United States Patent Application Publication US 2024/0194290 A1 - sequence listing, part 2

SEQ ID NO: 26137 - protein, 34 aa, Artificial Sequence
  Quasi-synthetic sequence derived from human genome
VKILRVLRVLRPLRAINRAKGLKHVVQCVFVAIR

SEQ ID NO: 26138 - protein, 34 aa, Artificial Sequence
  Quasi-synthetic sequence derived from human genome
IPLLRKRRFQLYRSTNPRARKNRSRIPLLRKHRF

SEQ ID NO: 26139 - protein, 34 aa, Artificial Sequence
  Quasi-synthetic sequence derived from human genome
KKKKRYLRASSNRNFLLTMRPFLKRAILVLSYVL

SEQ ID NO: 26140 - protein, 34 aa, Artificial Sequence
  Quasi-synthetic sequence derived from human genome
RCNRRLKSQILLKKYLMKRRWKKNFIAVSAANRF

SEQ ID NO: 26141 - protein, 34 aa, Artificial Sequence
  Quasi-synthetic sequence derived from human genome
KAERKITSRPFTRFRTAVRVVIAILRLRFLVKKW

SEQ ID NO: 26142 - protein, 34 aa, Artificial Sequence
  Quasi-synthetic sequence derived from human genome
RWLLRTKRLHWSRLLFLLGMLIIGSTYQHLRRPR

SEQ ID NO: 26143 - protein, 34 aa, Artificial Sequence
  Quasi-synthetic sequence derived from human genome
IFKKKAHKLTSAPLKQNFQKLLKLFYIKKLKPLY

SEQ ID NO: 26144 - protein, 34 aa, Artificial Sequence
  Quasi-synthetic sequence derived from human genome
VLVLLVSLGVAIHLCCRRRRARLRFMKQLRLHPL

SEQ ID NO: 26145 - protein, 34 aa, Artificial Sequence
  Quasi-synthetic sequence derived from human genome
YRLAVRTVIRAFVKCTKARYLKKKNMRTLWINRI

SEQ ID NO: 26146 - protein, 34 aa, Artificial Sequence
  Quasi-synthetic sequence derived from human genome
KSWRLEFLFLRRRCFLLTFYLWFLFFSRFLLMLF

SEQ ID NO: 26147 - protein, 34 aa, Artificial Sequence
  Quasi-synthetic sequence derived from human genome
CRRLRRANRVLRARCRRAVKSNACYWAVLLLVFL

SEQ ID NO: 26148 - protein, 34 aa, Artificial Sequence
  Quasi-synthetic sequence derived from human genome
LRLLGLRRGLRRLRRLWAGPRVQRGRGRGRGRGW

SEQ ID NO: 26149 - protein, 34 aa, Artificial Sequence
  Quasi-synthetic sequence derived from human genome
SVRTWWRWLTFWRRLQSAFLKNRSLRTKSSLWRR

SEQ ID NO: 26150 - protein, 34 aa, Artificial Sequence
  Quasi-synthetic sequence derived from human genome
KMCICFSFCLWFVLQVLIVVLRIVRYRKSSKLIK

SEQ ID NO: 26151 - protein, 34 aa, Artificial Sequence
  Quasi-synthetic sequence derived from human genome
LTMVGKIKRLKKSAFVVLILLITAKLLVLPLLCR

SEQ ID NO: 26152 - protein, 34 aa, Artificial Sequence
  Quasi-synthetic sequence derived from human genome
ILKRALKVKQAMMQLYVLKLLKVQTKYLGRQWRK

SEQ ID NO: 26153 - protein, 34 aa, Artificial Sequence
  Quasi-synthetic sequence derived from human genome
FLRVVRFVRILRIFKLTRHFVGLRVLGHTLRAST

SEQ ID NO: 26154 - protein, 34 aa, Artificial Sequence
  Quasi-synthetic sequence derived from human genome
RVRVLSVARPGLWLYTHPLIKLLFLPRRSRCKFF

SEQ ID NO: 26155 - protein, 34 aa, Artificial Sequence
  Quasi-synthetic sequence derived from human genome
LKRFKVMKIKVLRSWCRQILKGLQFLHTRTPPII

SEQ ID NO: 26156 - protein, 34 aa, Artificial Sequence
  Quasi-synthetic sequence derived from human genome
LLVYKDKLRINRFPWPKVLKISYKRSSFFIKIRP

SEQ ID NO: 26157 - protein, 34 aa, Artificial Sequence
  Quasi-synthetic sequence derived from human genome
LLWRGRIPGRQWIGKHRRPRFVSLRAKQNMIRRL

SEQ ID NO: 26158 - protein, 34 aa, Artificial Sequence
  Quasi-synthetic sequence derived from human genome
LLWKNWTLRKRQKIRFVVELVWPLSLFLVLIWLR

SEQ ID NO: 26159 - protein, 34 aa, Artificial Sequence
  Quasi-synthetic sequence derived from human genome
ILALVLLVVLLVVCGPLAYKKLVKKFRQKKQRQW

SEQ ID NO: 26160 - protein, 34 aa, Artificial Sequence
  Quasi-synthetic sequence derived from human genome
LVRAHRHRGLRPRRQKALRMILAVVLVFFVCWLP

SEQ ID NO: 26161 - protein, 34 aa, Artificial Sequence
  Quasi-synthetic sequence derived from human genome
LLLWVKQRKDLLHLCCKKLKILGMPFRNIRSILK

SEQ ID NO: 26162 - protein, 34 aa, Artificial Sequence
  Quasi-synthetic sequence derived from human genome
IFGLLLLVLFILFLTWCRVQKQKHLPLRVSTRRR

SEQ ID NO: 26163 - protein, 34 aa, Artificial Sequence
  Quasi-synthetic sequence derived from human genome
RRKLKFFFMNPCEKFWARGRKPWKLAIQILKIAM

SEQ ID NO: 26164 - protein, 34 aa, Artificial Sequence
  Quasi-synthetic sequence derived from human genome
RCRGRKRCIKKFSIQRFPKILVLHLKRFSESRIR

SEQ ID NO: 26165 - protein, 34 aa, Artificial Sequence
  Quasi-synthetic sequence derived from human genome
VLVKRKRTKGKKLLLSIGVLLHKWKNVCIVLTAL

SEQ ID NO: 26166 - protein, 34 aa, Artificial Sequence
  Quasi-synthetic sequence derived from human genome
RLQHGNMRKNMRVLSRISKFRRLRQLLRRRKKTR

SEQ ID NO: 26167 - protein, 34 aa, Artificial Sequence
  Quasi-synthetic sequence derived from human genome
LRIIRLVRVFRIFKLSRHSKGLQILGHTLRASMR

SEQ ID NO: 26168 - protein, 34 aa, Artificial Sequence
  Quasi-synthetic sequence derived from human genome
CKKKQKSTKKFWIQKLPKVLCLHLKRFHWTAYLR

SEQ ID NO: 26169 - protein, 34 aa, Artificial Sequence
  Quasi-synthetic sequence derived from human genome
WLLRKKYLRMRKAAITMQRYVRGYQARCYAKFLR

SEQ ID NO: 26170 - protein, 34 aa, Artificial Sequence
  Quasi-synthetic sequence derived from human genome
RRLRGLRRAAAGTSRLLFQRLLPCGVIKFRYIWI

SEQ ID NO: 26171 - protein, 34 aa, Artificial Sequence
  Quasi-synthetic sequence derived from human genome
RLLRGLWQRWRRYKYRFVPWIALNLSHNPRTLRY

SEQ ID NO: 26172 - protein, 34 aa, Artificial Sequence
  Quasi-synthetic sequence derived from human genome
FKLLILLLGSWALFFRRPKASLPRVFVLRALLMV

SEQ ID NO: 26173 - protein, 34 aa, Artificial Sequence
  Quasi-synthetic sequence derived from human genome
RLRHLRRPRVARLLCLGVWALILVFAVPAARVHR

SEQ ID NO: 26174 - protein, 34 aa, Artificial Sequence
  Quasi-synthetic sequence derived from human genome
NKGRDIKTIKSLRVLRVLRPLKTIKRLPKLKAVF

SEQ ID NO: 26175 - protein, 34 aa, Artificial Sequence
  Quasi-synthetic sequence derived from human genome
KLLKYYVLNALKHRPPKAQKKRYLFRSFKATKFF

SEQ ID NO: 26176 - protein, 34 aa, Artificial Sequence
  Quasi-synthetic sequence derived from human genome
RSGHVLYSGWLRKSPPEKKLRLFAWRKRWFILRR

SEQ ID NO: 26177 - protein, 34 aa, Artificial Sequence
  Quasi-synthetic sequence derived from human genome
AAKLKRKYWWKNLKMMIILGVICAIILIIIIVYF

SEQ ID NO: 26178 - protein, 34 aa, Artificial Sequence
  Quasi-synthetic sequence derived from human genome
LLRKRRFQLYRSMNSRARKNRSQIVLFQKRRFHF

SEQ ID NO: 26179 - protein, 34 aa, Artificial Sequence
  Quasi-synthetic sequence derived from human genome
LLRIANFSNLIFLRIKRRVKSVVLVILLGPLLFL

SEQ ID NO: 26180 - protein, 34 aa, Artificial Sequence
  Quasi-synthetic sequence derived from human genome
KGIQCFLVVVALLCVPWMLLFKPLVLRRQYLRRK

SEQ ID NO: 26181 - protein, 34 aa, Artificial Sequence
  Quasi-synthetic sequence derived from human genome
FSRSKKKKKKKKKRQCFAFLIYFRLGIKMGKQGI

SEQ ID NO: 26182 - protein, 34 aa, Artificial Sequence
  Quasi-synthetic sequence derived from human genome
RTPILMTILINFLIFIRILGILLSKLRTRQMRCR

SEQ ID NO: 26183 - protein, 34 aa, Artificial Sequence
  Quasi-synthetic sequence derived from human genome
LLKIANFSNLIFLRLKRRVKSVILVVLLGPLLFL

SEQ ID NO: 26184 - protein, 34 aa, Artificial Sequence
  Quasi-synthetic sequence derived from human genome
ILAALALLVLILLCLLIYYCRRRCLKPRQQHRKL

SEQ ID NO: 26185 - protein, 34 aa, Artificial Sequence
  Quasi-synthetic sequence derived from human genome
VRIRVIKKKKVIMKKRKKLTLTRPTPLVTAGPLV

SEQ ID NO: 26186 - protein, 34 aa, Artificial Sequence
  Quasi-synthetic sequence derived from human genome
VYNPVIYVFMIRKFRRSLLQLLCLRLLRCQRPAK

SEQ ID NO: 26187 - protein, 34 aa, Artificial Sequence
  Quasi-synthetic sequence derived from human genome
LQKRSWPFLRSFRVLRVFKLAKSWPTLNTLIKII

SEQ ID NO: 26188 - protein, 34 aa, Artificial Sequence
  Quasi-synthetic sequence derived from human genome
MGKLRYLSLLCLLPLVAFLLFCLHVLFKKRTKSK

SEQ ID NO: 26189 - protein, 34 aa, Artificial Sequence
  Quasi-synthetic sequence derived from human genome
RIVRLARIGRILRLVRAARGIRTLLFALMMSLPS

SEQ ID NO: 26190 - protein, 34 aa, Artificial Sequence
  Quasi-synthetic sequence derived from human genome
WLRRKLRGKRRPVIAFCLLMILSAMAVTRFPPQR

SEQ ID NO: 26191 - protein, 34 aa, Artificial Sequence
  Quasi-synthetic sequence derived from human genome
LLAVIVLVALLLLWRRRQKRRTGALVLSRGGKRN

SEQ ID NO: 26192 - protein, 34 aa, Artificial Sequence
  Quasi-synthetic sequence derived from human genome
ISYKTFLPKCIRAKIQDYHILTRKRIRYRFRRFI

SEQ ID NO: 26193 - protein, 34 aa, Artificial Sequence
  Quasi-synthetic sequence derived from human genome
LLSLVLMAGTFFIAFFLRKFKNSRFFPGRIRRVI

SEQ ID NO: 26194 - protein, 34 aa, Artificial Sequence
  Quasi-synthetic sequence derived from human genome
LRRRLKYFFMSPCDKFRAKGRKPCKLMLQVVKIL

SEQ ID NO: 26195 - protein, 34 aa, Artificial Sequence
  Quasi-synthetic sequence derived from human genome
RRVTRNLVRNKLAVITRLLQNLIMGLFLLFFVLR

SEQ ID NO: 26196 - protein, 34 aa, Artificial Sequence
  Quasi-synthetic sequence derived from human genome
LYGFIFYLLASVLLSLLLILKAGRRWNKYFKSRR

SEQ ID NO: 26197 - protein, 34 aa, Artificial Sequence
  Quasi-synthetic sequence derived from human genome
GVGLCLRLLLFFRFKRTLDRICVLFLLGWHRKPR

SEQ ID NO: 26198 - protein, 34 aa, Artificial Sequence
  Quasi-synthetic sequence derived from human genome
RALALFVITCLVIFVLVHSFLKKLLGKKLTRCLK

SEQ ID NO: 26199 - protein, 34 aa, Artificial Sequence
  Quasi-synthetic sequence derived from human genome
IHRRVLKKNPLKNLRIMLKLNPYAKTMRRNTILR

SEQ ID NO: 26200 - protein, 34 aa, Artificial Sequence
  Quasi-synthetic sequence derived from human genome
KTARLFSKKIFCCLFFITLFFIRLLSYMFFHVRF

SEQ ID NO: 26201 - protein, 34 aa, Artificial Sequence
  Quasi-synthetic sequence derived from human genome
LRRQMWWRGCKIKAIMALVAAILLLVIIILIVMK

SEQ ID NO: 26202 - protein, 34 aa, Artificial Sequence
  Quasi-synthetic sequence derived from human genome
ILLLTLVSFLIFILFIIVQLFIMKLRKAHVIWKK

SEQ ID NO: 26203 - protein, 34 aa, Artificial Sequence
  Quasi-synthetic sequence derived from human genome
MSLAILRVIRLVRVFRIFKLSRHSKGLQILGKTL

SEQ ID NO: 26204 - protein, 34 aa, Artificial Sequence
  Quasi-synthetic sequence derived from human genome
LYSRAVRNLKKKLLPWQRRGLLRAQGLRGWKARR

SEQ ID NO: 26205 - protein, 34 aa, Artificial Sequence
  Quasi-synthetic sequence derived from human genome
QLGAGLKVLFKKTHRILRRLFNLCKRCHRQPRFR

SEQ ID NO: 26206 - protein, 34 aa, Artificial Sequence
  Quasi-synthetic sequence derived from human genome
RASFKRARRPGARALRLVLGIVLLFWACFLPFWL

SEQ ID NO: 26207 - protein, 34 aa, Artificial Sequence
  Quasi-synthetic sequence derived from human genome
GIPKAKQRLKRLRNIHYLFNTALFLIAWRLLIAR

SEQ ID NO: 26208 - protein, 34 aa, Artificial Sequence
  Quasi-synthetic sequence derived from human genome
FKAKNIKKKKVSIMVSVDGVKVILKKKKKLLLLQ

SEQ ID NO: 26209 - protein, 34 aa, Artificial Sequence
  Quasi-synthetic sequence derived from human genome
FWWILRFPVFLAILINFFIFVRIVQLLVAKLRAR

SEQ ID NO: 26210 - protein, 34 aa, Artificial Sequence
  Quasi-synthetic sequence derived from human genome
IPLLRKPWFQLGHSMNPRARKNRSRIPLLRKRRF

SEQ ID NO: 26211 - protein, 34 aa, Artificial Sequence
  Quasi-synthetic sequence derived from human genome
RLQQGNMRKNVRVLSRTSKFRRLRQLLRRRKKRW

SEQ ID NO: 26212 - protein, 34 aa, Artificial Sequence
  Quasi-synthetic sequence derived from human genome
IYLGLAWLSLFVNWKVSMFVEVHKAIKKRRRRRK

SEQ ID NO: 26213 - protein, 34 aa, Artificial Sequence
  Quasi-synthetic sequence derived from human genome
FILILGNKKLKQIFLSVLRHVRYWVKDRSLRLHR

SEQ ID NO: 26214 - protein, 34 aa, Artificial Sequence
  Quasi-synthetic sequence derived from human genome
RRRRAMRAFRMLLYSKSTSLTFHWKLWGRHRGRR

SEQ ID NO: 26215 - protein, 34 aa, Artificial Sequence
  Quasi-synthetic sequence derived from human genome
RARRKTARMLMIVLLVFAICYLPISILNVLKRVF

SEQ ID NO: 26216 - protein, 34 aa, Artificial Sequence
  Quasi-synthetic sequence derived from human genome
YARAWLARRRFQSIRRFVLNIQLTYRVQRLQKKL

SEQ ID NO: 26217 - protein, 34 aa, Artificial Sequence
  Quasi-synthetic sequence derived from human genome
TLFVKRLRRKTYLSNMAKTMRMVLKSKRRVSVLK

SEQ ID NO: 26218 - protein, 34 aa, Artificial Sequence
  Quasi-synthetic sequence derived from human genome
VGILLVVVLGVVFGILIKRRQQKIRKYTMRRLLQ

SEQ ID NO: 26219 - protein, 34 aa, Artificial Sequence
  Quasi-synthetic sequence derived from human genome
QFFHVKVLNINLKRKFIKKRIIIISNYSKRNSLL

SEQ ID NO: 26220 - protein, 34 aa, Artificial Sequence
  Quasi-synthetic sequence derived from human genome
YRLRRVIAAFYFPKREKKRILFLYNDLLKKRAAF

SEQ ID NO: 26221 - protein, 34 aa, Artificial Sequence
  Quasi-synthetic sequence derived from human genome
AKLWFKFQRYFRRKPVRFFTFLALYLTAGSLVFL

SEQ ID NO: 26222 - protein, 34 aa, Artificial Sequence
  Quasi-synthetic sequence derived from human genome
TLKTYLKRFKVMKPKVLRSWCRQILKGLQFLHTR

SEQ ID NO: 26223 - protein, 34 aa, Artificial Sequence
  Quasi-synthetic sequence derived from human genome
AKLKRKYWWKNCKMWAIGITVLVIFIIIIIVWVV

SEQ ID NO: 26224 - protein, 34 aa, Artificial Sequence
  Quasi-synthetic sequence derived from human genome
TRWARPFYLAFVFCLALGLLQAIKLYLRRQRLLR

SEQ ID NO: 26225 - protein, 34 aa, Artificial Sequence
  Quasi-synthetic sequence derived from human genome
WITAVLPTVIICVMVFCLILWKWKKKKRPRNSYK

SEQ ID NO: 26226 - protein, 34 aa, Artificial Sequence
  Quasi-synthetic sequence derived from human genome
RKFFLFYRQQKWASGVIAIAWLLYCHKTRLKKIL

SEQ ID NO: 26227 - protein, 34 aa, Artificial Sequence
  Quasi-synthetic sequence derived from human genome
PLMNPIIYSIKTKQIRQRIIKKFQFIKSLRCFWK

SEQ ID NO: 26228 - protein, 34 aa, Artificial Sequence
  Quasi-synthetic sequence derived from human genome
LIAIAIVAVLLVLTCCFCICKKCLFKKKNKKKGK

SEQ ID NO: 26229 - protein, 34 aa, Artificial Sequence
  Quasi-synthetic sequence derived from human genome
LRPLVKPKIVKKRTKKFIRHQSDRYVKIKRNWRK

SEQ ID NO: 26230 - protein, 34 aa, Artificial Sequence
  Quasi-synthetic sequence derived from human genome
KQKLLRHLVPAAALRRKRKALWAHLFSSLRGYLK

SEQ ID NO: 26231 - protein, 34 aa, Artificial Sequence
  Quasi-synthetic sequence derived from human genome
RRLRKNLKSLIIVHPSWFIRTVLAISRPFISVKF

SEQ ID NO: 26232 - protein, 34 aa, Artificial Sequence
  Quasi-synthetic sequence derived from human genome
IRGGATRAAGVFYPWRFRLLCLLRRWLPRPRAWF

SEQ ID NO: 26233 - protein, 34 aa, Artificial Sequence
  Quasi-synthetic sequence derived from human genome
KRRPKRREIPLKVLVKAVLFACMLMRKTMASRVR

SEQ ID NO: 26234 - protein, 34 aa, Artificial Sequence
  Quasi-synthetic sequence derived from human genome
CLQYLGVRVLLRFQRKLSVLLLLLGRRRVDFRLV

SEQ ID NO: 26235 - protein, 34 aa, Artificial Sequence
  Quasi-synthetic sequence derived from human genome
ALWRRQIYAVATLRFLKLRRERRALLCLLLVLGI

SEQ ID NO: 26236 - protein, 34 aa, Artificial Sequence
  Quasi-synthetic sequence derived from human genome
RVLPLKKPPMKSLRKKGSGKILTPAKKSFLRRLF

SEQ ID NO: 26237 - protein, 34 aa, Artificial Sequence
  Quasi-synthetic sequence derived from human genome
MKKFLYIKSVFHTLRMAQRRHKRVRTWTRHINIF

SEQ ID NO: 26238 - protein, 34 aa, Artificial Sequence
  Quasi-synthetic sequence derived from human genome
FSPLRILRKRNKALRKIRKLQKQGLLQVTPKGFI

SEQ ID NO: 26239 - protein, 34 aa, Artificial Sequence
  Quasi-synthetic sequence derived from human genome
LGIILFCSFKIVWSLRRRQQLARQARMKKATRFI

SEQ ID NO: 26240 - protein, 34 aa, Artificial Sequence
  Quasi-synthetic sequence derived from human genome
KRMRVKKLPMILALHLKRFKYMEQLHRYTKLSYR

SEQ ID NO: 26241 - protein, 34 aa, Artificial Sequence
  Quasi-synthetic sequence derived from human genome
VIFLLIIIFLTVLLLKLRKRHRKHTQQRAAALSL

SEQ ID NO: 26242 - protein, 34 aa, Artificial Sequence
  Quasi-synthetic sequence derived from human genome
KLSMIRFRYRILRSQHFRTKSKVCKLRKAQRSWV

SEQ ID NO: 26243 - protein, 34 aa, Artificial Sequence
  Quasi-synthetic sequence derived from human genome
KNFNLPRLCIRKFFPKKKCFVFDLPIHRRKLAQL

SEQ ID NO: 26244 - protein, 34 aa, Artificial Sequence
  Quasi-synthetic sequence derived from human genome
KVWRGTLARMRYKRTKAALTIIRYYRRYKVKSYI

SEQ ID NO: 26245 - protein, 34 aa, Artificial Sequence
  Quasi-synthetic sequence derived from human genome
HSFILIMGNSKLREAFLKMLRFVKCFLRRRKPFV

SEQ ID NO: 26246 - protein, 34 aa, Artificial Sequence
  Quasi-synthetic sequence derived from human genome
LVRRALLHAALSACIIQCWWRLILSKILKKRRQA

SEQ ID NO: 26247 - protein, 34 aa, Artificial Sequence
  Quasi-synthetic sequence derived from human genome
RFRRAFVTVTHRLLLLCLGVVMVCVVLRYMKYRW

SEQ ID NO: 26248 - protein, 34 aa, Artificial Sequence
  Quasi-synthetic sequence derived from human genome
PLLAWLLLPLLLLLLVLLLAAYFFRFRKQRKAVV

SEQ ID NO: 26249 - protein, 34 aa, Artificial Sequence
  Quasi-synthetic sequence derived from human genome
AAAPRASGRCVIAPVRAVLRLRRRVCVLRKRRLL

SEQ ID NO: 26250 - protein, 34 aa, Artificial Sequence
  Quasi-synthetic sequence derived from human genome
ILVNLIHLFIFRKSNFIFDKLHKVGIKTRRQWRR

SEQ ID NO: 26251 - protein, 34 aa, Artificial Sequence
  Quasi-synthetic sequence derived from human genome
YVRLNMKQKHYVRGRALRSRLLRKQAWKQKWRKK

SEQ ID NO: 26252 - protein, 34 aa, Artificial Sequence
  Quasi-synthetic sequence derived from human genome
KPVSFHKKKIFWSHRNSFPHLLYRLLFPRLMLLL

SEQ ID NO: 26253 - protein, 34 aa, Artificial Sequence
  Quasi-synthetic sequence derived from human genome
FLPARQLWKWFGKPTQRRGMKGKARKLFYKAIVR

SEQ ID NO: 26254 - protein, 34 aa, Artificial Sequence
  Quasi-synthetic sequence derived from human genome
LKPFLLGCPRFVVIDNCIALKKVASRLKKKRKKK

SEQ ID NO: 26255 - protein, 34 aa, Artificial Sequence
  Quasi-synthetic sequence derived from human genome
FKCYFKHTLQQKVFILFLTLWLLSLLKLLNVRRL

SEQ ID NO: 26256 - protein, 34 aa, Artificial Sequence
  Quasi-synthetic sequence derived from human genome
MGVLVLRGNTKINTFNWAKIRKLSFKRKHFLIKL

SEQ ID NO: 26257 - protein, 34 aa, Artificial Sequence
  Quasi-synthetic sequence derived from human genome
KKRSKQPLGEVKRRLSLYLTKIHFWLPVLKMIRK

SEQ ID NO: 26258 - protein, 34 aa, Artificial Sequence
  Quasi-synthetic sequence derived from human genome
AIRVALAVAVLKTVILGLLCLLLLWWRRRKGSRA

SEQ ID NO: 26259 - protein, 34 aa, Artificial Sequence
  Quasi-synthetic sequence derived from human genome
KTRRWRGLGSLFRRACCVALPLQLLLLLFLLLLF

SEQ ID NO: 26260 - protein, 34 aa, Artificial Sequence
  Quasi-synthetic sequence derived from human genome
WRVIGYHVVVWMMAGIPLLLFRWKPLWGVRLRLR

SEQ ID NO: 26261 - protein, 34 aa, Artificial Sequence
  Quasi-synthetic sequence derived from human genome
KLRIRTKAAVKIQAWWRGTLVRRTLLHAALRAWI

SEQ ID NO: 26262 - protein, 34 aa, Artificial Sequence
  Quasi-synthetic sequence derived from human genome
VIAGAFVGILLFLILVGLLIFFLKRRNKKKQQKP

SEQ ID NO: 26263 - protein, 34 aa, Artificial Sequence
  Quasi-synthetic sequence derived from human genome
VKRKKNVLRLCCKKLKIFAMPMQDIKMILKMVQL

SEQ ID NO: 26264 - protein, 34 aa, Artificial Sequence
  Quasi-synthetic sequence derived from human genome
LFFIKNQRSSLRIRLFNFSLKLLSCLLYIIRVLL

SEQ ID NO: 26265 - protein, 34 aa, Artificial Sequence
  Quasi-synthetic sequence derived from human genome
KRMKVKKLPMILALHLKRFKYMDQLHRYTKLSYR

SEQ ID NO: 26266 - protein, 34 aa, Artificial Sequence
  Quasi-synthetic sequence derived from human genome
KLSRALRYYYNKRILHKTKGKRFTYKFNFNKLVL

SEQ ID NO: 26267 - protein, 34 aa, Artificial Sequence
  Quasi-synthetic sequence derived from human genome
LLLPKGVVLKLKPVATRFPRKAWRQKRSSVLKPL

SEQ ID NO: 26268 - protein, 34 aa, Artificial Sequence
  Quasi-synthetic sequence derived from human genome
LRVIRLVRVFRIFKLSRHSKGLQILGQTLRASMR

SEQ ID NO: 26269 - protein, 34 aa, Artificial Sequence
  Quasi-synthetic sequence derived from human genome
WLRRRYLRLRYEDLVRQPRAQLRRLLRFSGLRAL

SEQ ID NO: 26270 - protein, 34 aa, Artificial Sequence
  Quasi-synthetic sequence derived from human genome
WLAIQKLRSKIHKKVDRKASKGRKLRFHVLSKLL

SEQ ID NO: 26271 - protein, 34 aa, Artificial Sequence
  Quasi-synthetic sequence derived from human genome
RRRPALGWLARLLRSRAGSRKRPLTLLQRAGLLL

SEQ ID NO: 26272 - protein, 34 aa, Artificial Sequence
  Quasi-synthetic sequence derived from human genome
YLRIIRFLPLFKIIVPILIRIADVQIKKRLSLMY

SEQ ID NO: 26273 - protein, 34 aa, Artificial Sequence
  Quasi-synthetic sequence derived from human genome
VLMLIILVALLMLVFRSKREVKRQKYRLSQLYKW

SEQ ID NO: 26274 - protein, 34 aa, Artificial Sequence
  Quasi-synthetic sequence derived from human genome
FLIIVGICLILIVIFMITKFVQDRHRARRNRLRK

SEQ ID NO: 26275 - protein, 34 aa, Artificial Sequence
  Quasi-synthetic sequence derived from human genome
LVPMIIVIFCYLRIWILVLQVRQRVKPDRKPKLK

SEQ ID NO: 26276 - protein, 34 aa, Artificial Sequence
  Quasi-synthetic sequence derived from human genome
ARKFLYLWIRMTFGRVFPSKARFYYEQRLLRKVF

SEQ ID NO: 26277 - protein, 34 aa, Artificial Sequence
  Quasi-synthetic sequence derived from human genome
LKLFRAARLIKLLRQGYTIRILLWTFVQSFKALP

SEQ ID NO: 26278 - protein, 34 aa, Artificial Sequence
  Quasi-synthetic sequence derived from human genome
MARRGWRRAPLRRGVGSSPRARRLMRPLWLLLAV

SEQ ID NO: 26279 - protein, 34 aa, Artificial Sequence
  Quasi-synthetic sequence derived from human genome
VKQGYVKIRSRKLGIFRRCWLVFKKASSKGPRRL

SEQ ID NO: 26280 - protein, 34 aa, Artificial Sequence
  Quasi-synthetic sequence derived from human genome
RISITFFRLFRVMRLVKLLSRGEGIRTLLWTFIK

SEQ ID NO: 26281 - protein, 34 aa, Artificial Sequence
  Quasi-synthetic sequence derived from human genome
GRWVRQQGPRVRRGISRLWLRVLLRLSPMAFRAL

SEQ ID NO: 26282 - protein, 34 aa, Artificial Sequence
  Quasi-synthetic sequence derived from human genome
KLLVHSLNLLAKQGLRLLRGLRRRNVQKKVALAK

SEQ ID NO: 26283 - protein, 34 aa, Artificial Sequence
  Quasi-synthetic sequence derived from human genome
LRVIRLVRVFRIFKLSRHSKGLQILGQTLKASMR

SEQ ID NO: 26284 - protein, 34 aa, Artificial Sequence
  Quasi-synthetic sequence derived from human genome
VLRVMRLMRIFRILKLARHSTGLRAFGFTLRQCY

SEQ ID NO: 26285 - protein, 34 aa, Artificial Sequence
  Quasi-synthetic sequence derived from human genome
RRKTKDAFYKNIVKKGYLLKKGKGKRWKNLYFIL

SEQ ID NO: 26286 - protein, 34 aa, Artificial Sequence
  Quasi-synthetic sequence derived from human genome
RFIKIIEVKNKKLVELLRRKVRLAQPYVGVFLKR

SEQ ID NO: 26287 - protein, 34 aa, Artificial Sequence
  Quasi-synthetic sequence derived from human genome
FYLSLFFWMLFKALLIIYGILVIFRRMMKSRMMV

SEQ ID NO: 26288 - protein, 34 aa, Artificial Sequence
  Quasi-synthetic sequence derived from human genome
KGGFILPVLGAVLALLFLLLVLLLLVRKKRKIKE

SEQ ID NO: 26289 - protein, 34 aa, Artificial Sequence
  Quasi-synthetic sequence derived from human genome
LQMVLQRRKFLQMKRRKYGFIYKTHLFGRPTVRV

SEQ ID NO: 26290 - protein, 34 aa, Artificial Sequence
  Quasi-synthetic sequence derived from human genome
IKSFFRQLNLYGFRKRRQCTFRTFTRIFSAKRLV

SEQ ID NO: 26291 - protein, 34 aa, Artificial Sequence
  Quasi-synthetic sequence derived from human genome
IQSWWRGTLGRRKAAKRKWAAQTIRRLIRGFVLR

SEQ ID NO: 26292 - protein, 34 aa, Artificial Sequence
  Quasi-synthetic sequence derived from human genome
YRLARQRIIQFQARCRAYLVRKAFRHRLWAVLTV

SEQ ID NO: 26293 - protein, 34 aa, Artificial Sequence
  Quasi-synthetic sequence derived from human genome
PFVPAVAKSIPRKRISLKRPKKCFRNLFHIRRNK

SEQ ID NO: 26294 - protein, 34 aa, Artificial Sequence
  Quasi-synthetic sequence derived from human genome
RISITFFRLFRVMRLVKLLSKGEGIRTLLWTFIK

SEQ ID NO: 26295 - protein, 34 aa, Artificial Sequence
  Quasi-synthetic sequence derived from human genome
LFFIKNQRSSLRIRLFNFSLKLLTCLLYIVRVLL

SEQ ID NO: 26296 - protein, 34 aa, Artificial Sequence
  Quasi-synthetic sequence derived from human genome
QKKKKIVKYGMGGLIILFLIAIIWFPLLFMSLVR

SEQ ID NO: 26297 - protein, 34 aa, Artificial Sequence
  Quasi-synthetic sequence derived from human genome
IILLIFISLFPEILLIVLKNVRRRSARRNLSCRR

SEQ ID NO: 26298 - protein, 34 aa, Artificial Sequence
  Quasi-synthetic sequence derived from human genome
RIRILCCLTFLVKVKSKALLKNRLLPPLLHTLFP

SEQ ID NO: 26299 - protein, 34 aa, Artificial Sequence
  Quasi-synthetic sequence derived from human genome
LSPSKIKTFLSLVWKRRILFFVVTLVSVFLVWKF

SEQ ID NO: 26300 - protein, 34 aa, Artificial Sequence
  Quasi-synthetic sequence derived from human genome
MRLKKHRWYKKILKSRDPIIFSVGWRRFQTIPLY

SEQ ID NO: 26301 - protein, 34 aa, Artificial Sequence
  Quasi-synthetic sequence derived from human genome
PFLLLILLCMSLLLFQVIRLYQRRRWMIRALHLF

SEQ ID NO: 26302 - protein, 34 aa, Artificial Sequence
  Quasi-synthetic sequence derived from human genome
FQFYLTFPLIFGLFIILLVIFLIWRCFLRNKTRR

SEQ ID NO: 26303 - protein, 34 aa, Artificial Sequence
  Quasi-synthetic sequence derived from human genome
IKLKNKIKYRAEACIKMQKTIRMWLCKRRHKPRI

SEQ ID NO: 26304 - protein, 34 aa, Artificial Sequence
  Quasi-synthetic sequence derived from human genome
GLSVLRTFRLMRVLKLVRFLPALQRQLVVLMKTM

SEQ ID NO: 26305 - protein, 34 aa, Artificial Sequence
  Quasi-synthetic sequence derived from human genome
LHISVMGGMIALLLSILCLVMILYTRRRWCKRRR

SEQ ID NO: 26306 - protein, 34 aa, Artificial Sequence
  Quasi-synthetic sequence derived from human genome
CPICLRPPRPGLRRQWKCVQRRCLRHLAHRLRRR

SEQ ID NO: 26307 - protein, 34 aa, Artificial Sequence
  Quasi-synthetic sequence derived from human genome
YLEKLRADKLRAACIRIQKTIRGWLLRKKYLRMR

SEQ ID NO: 26308 - protein, 34 aa, Artificial Sequence
  Quasi-synthetic sequence derived from human genome
RRLFVRRGQPFTIILYFRAPVRAFLPALKKVALT

SEQ ID NO: 26309 - protein, 34 aa, Artificial Sequence
  Quasi-synthetic sequence derived from human genome
LRRNKAALLFWHILLLGPIVRCLHTIRNYHKWLK

SEQ ID NO: 26310 - protein, 34 aa, Artificial Sequence
  Quasi-synthetic sequence derived from human genome
FLALQSLRFGFGFRRGRSFLLRSWHHLMKRVQIK

SEQ ID NO: 26311 - protein, 34 aa, Artificial Sequence
  Quasi-synthetic sequence derived from human genome
CTRLPIRMAKALGKRTAKYRWFAVLYLLVCFLLL

SEQ ID NO: 26312 - protein, 34 aa, Artificial Sequence
  Quasi-synthetic sequence derived from human genome
FRPGKVLRFLRLFGPGKNVPSVWRSARRKRKKKH

SEQ ID NO: 26313 - protein, 34 aa, Artificial Sequence
  Quasi-synthetic sequence derived from human genome
FHRWKVVLLVRTDKRSDSLIRKKFRMMKIPKPIL

SEQ ID NO: 26314 - protein, 34 aa, Artificial Sequence
  Quasi-synthetic sequence derived from human genome
MLLRKRYRHRPCRLQFLLLLLMLGCVLMMVAMLH

SEQ ID NO: 26315 - protein, 34 aa, Artificial Sequence
  Quasi-synthetic sequence derived from human genome
VFVFHRLKIKQILPTIYKRKNLSLFLSISLLIFW

SEQ ID NO: 26316 - protein, 34 aa, Artificial Sequence
  Quasi-synthetic sequence derived from human genome
FCQKGFKIQSKLLKHKQIHTRNKAFRALLLKKRR

SEQ ID NO: 26317 - protein, 34 aa, Artificial Sequence
  Quasi-synthetic sequence derived from human genome
LIRKKFRMMKIPKPILFGLNIAMKKQTKISGKMQ

SEQ ID NO: 26318 - protein, 34 aa, Artificial Sequence
  Quasi-synthetic sequence derived from human genome
IIEKYFVSPTLFRVIRLARIGRILRLIKGAKGIR

SEQ ID NO: 26319 - protein, 34 aa, Artificial Sequence
  Quasi-synthetic sequence derived from human genome
LVRKQMRLQRKAVISLQSYFRMRKARQYYLKMYK

SEQ ID NO: 26320 - protein, 34 aa, Artificial Sequence
  Quasi-synthetic sequence derived from human genome
VLFWVILVLVVVVGSSAFLLCHRRACRKRIRQKL

SEQ ID NO: 26321 - protein, 34 aa, Artificial Sequence
  Quasi-synthetic sequence derived from human genome
LVKRVNHWLTCSRWKKVQWCSLSVIKLKNKIKYR

SEQ ID NO: 26322 - protein, 34 aa, Artificial Sequence
  Quasi-synthetic sequence derived from human genome
WVKMYGYFAGLCRRLQKFWRVTVKGFFVKKKEKK

SEQ ID NO: 26323 - protein, 34 aa, Artificial Sequence
  Quasi-synthetic sequence derived from human genome
RRLRKNLKSLIIVHPSWFIRTLLAVTRPFISSKF

SEQ ID NO: 26324 - protein, 34 aa, Artificial Sequence
  Quasi-synthetic sequence derived from human genome
KLLKKIGISWNKKYRKQHGPLRKFLQLHSQIFLL

SEQ ID NO: 26325 - protein, 34 aa, Artificial Sequence
  Quasi-synthetic sequence derived from human genome
YTFLTCFAGFWLIWGLIVLLCCFCSFLRRRLKRR

SEQ ID NO: 26326 - protein, 34 aa, Artificial Sequence
  Quasi-synthetic sequence derived from human genome
LLRKHRFQLYRSMNSRARKNRSQIVLFQKRRFHF

SEQ ID NO: 26327 - protein, 34 aa, Artificial Sequence
  Quasi-synthetic sequence derived from human genome
VACMSIMALLLLLLLLLLYKYKQKPKYQVRWKII

SEQ ID NO: 26328 - protein, 34 aa, Artificial Sequence
  Quasi-synthetic sequence derived from human genome
IYIQAIFRGKKARRHLKMMHIAATLIQRRFRTLM

SEQ ID NO: 26329 - protein, 34 aa, Artificial Sequence
  Quasi-synthetic sequence derived from human genome
AFLLACVATMIFMITKCCLFCFRKLAKTGKKKKR

SEQ ID NO: 26330 - protein, 34 aa, Artificial Sequence
  Quasi-synthetic sequence derived from human genome
AKLLFTPQHKMLRLRLPNLKMVRLRVSFSAVVFK

SEQ ID NO: 26331 - protein, 34 aa, Artificial Sequence
  Quasi-synthetic sequence derived from human genome
RILKSPEIQRALRAPRKKIHRRVLKKNPLKNLRI

SEQ ID NO: 26332 - protein, 34 aa, Artificial Sequence
  Quasi-synthetic sequence derived from human genome
LLVLALASYRRLCLRLRLADCLVPYSRALYRRRR

SEQ ID NO: 26333 - protein, 34 aa, Artificial Sequence
  Quasi-synthetic sequence derived from human genome
LLIIRSLRQGLRVEKRLKTKAVRMIAIVLAIFLV

SEQ ID NO: 26334 - protein, 34 aa, Artificial Sequence
  Quasi-synthetic sequence derived from human genome
LALVLPSIVILGKIILFLPCISRKLKRIKKGWEK

SEQ ID NO: 26335 - protein, 34 aa, Artificial Sequence
  Quasi-synthetic sequence derived from human genome
LLILLTGVLCHRFHGLWYMKMMWAWLQAKRKPRK

SEQ ID NO: 26336 - protein, 34 aa, Artificial Sequence
  Quasi-synthetic sequence derived from human genome
YLARQRYQQMRRSLVKFRSLVHAYVSRRRYLKLR

SEQ ID NO: 26337 - protein, 34 aa, Artificial Sequence
  Quasi-synthetic sequence derived from human genome
VGWIIAISLLVGILIFLLLAVLLWKMGFFRRRYK

SEQ ID NO: 26338 - protein, 34 aa, Artificial Sequence
  Quasi-synthetic sequence derived from human genome
MRKNMRVLSRTSKFRRLRQLLRRRKKRQQVRSIS

SEQ ID NO: 26339 - protein, 34 aa, Artificial Sequence
  Quasi-synthetic sequence derived from human genome
IFSAILKSLQSYFSPTLFRVIRLARIGRILRLIR

SEQ ID NO: 26340 - protein, 34 aa, Artificial Sequence
  Quasi-synthetic sequence derived from human genome
LFFRKRRADMPRVFVFRALLLVLIFLFVVSYWLF

SEQ ID NO: 26341 - protein, 34 aa, Artificial Sequence
  Quasi-synthetic sequence derived from human genome
ILTRLMNFFVFSRGLLQYINQRKKFRRRWVGALA

SEQ ID NO: 26342 - protein, 34 aa, Artificial Sequence
  Quasi-synthetic sequence derived from human genome
AIALAFLPLVVTLLVRYRHYFRLLVRTVLLRSLR

SEQ ID NO: 26343 - protein, 34 aa, Artificial Sequence
  Quasi-synthetic sequence derived from human genome
IYLRLLVKLYRFLARRTNSTFNQVVLKRLFMSRT

SEQ ID NO: 26344 - protein, 34 aa, Artificial Sequence
  Quasi-synthetic sequence derived from human genome
RLFRAARLIKLLRQGYTIRILLWTFVQSFKALPY

SEQ ID NO: 26345 - protein, 34 aa, Artificial Sequence
  Quasi-synthetic sequence derived from human genome
ILKTLLRCRNEKKRHRAVRLIFTIMIVYFLFWAP

SEQ ID NO: 26346 - protein, 34 aa, Artificial Sequence
  Quasi-synthetic sequence derived from human genome
LSRALRYYYNKRILHKTKGKRFTYKFNFSKLIVV

SEQ ID NO: 26347 - protein, 34 aa, Artificial Sequence
  Quasi-synthetic sequence derived from human genome
IKLWRRNLWIFVSKFTEFDARKLHKLYKMAHKKR

SEQ ID NO: 26348 - protein, 34 aa, Artificial Sequence
  Quasi-synthetic sequence derived from human genome
ASIWWIIRGPVILSILINFILFINILRILMRKLR

SEQ ID NO: 26349 - protein, 34 aa, Artificial Sequence
  Quasi-synthetic sequence derived from human genome
WQIPLGRRFRSLKMWFVFRMYGVKGLQAYIRKHV

SEQ ID NO: 26350 - protein, 34 aa, Artificial Sequence
  Quasi-synthetic sequence derived from human genome
RLLLVHGRWSYIRMCKFLRYFFYKNFAFTLVHFW

SEQ ID NO: 26351 - protein, 34 aa, Artificial Sequence
  Quasi-synthetic sequence derived from human genome
KLSRALRYYYNKRILHKTKGKRFTYKFNFSKVVL

SEQ ID NO: 26352 - protein, 34 aa, Artificial Sequence
  Quasi-synthetic sequence derived from human genome
AYYQKKSRKKMCILVLVLSVIILILGLIIWLVYK

SEQ ID NO: 26353 - protein, 34 aa, Artificial Sequence
  Quasi-synthetic sequence derived from human genome
FLLQYFVPLGFILICYLKIVICLRRRNAKVDKKK

SEQ ID NO: 26354 - protein, 34 aa, Artificial Sequence
  Quasi-synthetic sequence derived from human genome
VITMPQYLRKRFGGRRIRLYLSVLSLFLYIFTKI

SEQ ID NO: 26355 - protein, 34 aa, Artificial Sequence
  Quasi-synthetic sequence derived from human genome
WLLLRKAPGGFMGPRWRRRWFVLKGHTLYWYRQP

SEQ ID NO: 26356 - protein, 34 aa, Artificial Sequence
  Quasi-synthetic sequence derived from human genome
PKKFQLNQHRRIKLSPLMMYEKLSMIRFRYRILR

SEQ ID NO: 26357 - protein, 34 aa, Artificial Sequence
  Quasi-synthetic sequence derived from human genome
KGWKLTQQQFVALLWKRLLIARRSRKGFFAQIVL

SEQ ID NO: 26358 - protein, 34 aa, Artificial Sequence
  Quasi-synthetic sequence derived from human genome
RRPRGSTARTLLRLLLRLLLFLGLLALALHFLGL

SEQ ID NO: 26359 - protein, 34 aa, Artificial Sequence
  Quasi-synthetic sequence derived from human genome
ALSTIVSQRKQIKRKAPRGFLKRVFKRKKPQLRL

SEQ ID NO: 26360 - protein, 34 aa, Artificial Sequence
  Quasi-synthetic sequence derived from human genome
FLARNRYRKILREHKAVIIQKRVRGWLARTHYKR

SEQ ID NO: 26361 - protein, 34 aa, Artificial Sequence
  Quasi-synthetic sequence derived from human genome
ILRTLFRSRSKRRHRTVKLIFAIVVAYFLSWGPY

SEQ ID NO: 26362 - protein, 34 aa, Artificial Sequence
  Quasi-synthetic sequence derived from human genome
TRRWKRWFKFRKRKGEKRPRPNHKAVARRAKLKF

SEQ ID NO: 26363 - protein, 34 aa, Artificial Sequence
  Quasi-synthetic sequence derived from human genome
RVLYFSIFSMFCLIGLATWQVFYLRRFFKAKKLI

SEQ ID NO: 26364 - protein, 34 aa, Artificial Sequence
  Quasi-synthetic sequence derived from human genome
HKELRKYIYIRSCVVIIQKRFRCFQAQKLYKRRK

SEQ ID NO: 26365 - protein, 34 aa, Artificial Sequence
  Quasi-synthetic sequence derived from human genome
TLVRRGRGGLRLGLRGPLRKLVLQSLVPLLLRLH

SEQ ID NO: 26366 - protein, 34 aa, Artificial Sequence
  Quasi-synthetic sequence derived from human genome
GFLLACVATVIFVVTKFCLFCFWKFARKGKKGKR

SEQ ID NO: 26367 - protein, 34 aa, Artificial Sequence
  Quasi-synthetic sequence derived from human genome
LYFNPWMRIFIQAKRVKTKHLCYCLYRPRKYLYV

SEQ ID NO: 26368 - protein, 34 aa, Artificial Sequence
  Quasi-synthetic sequence derived from human genome
RKAPLWLRAKFQRLLFKLGCYIQKNCGKFLVVGL

SEQ ID NO: 26369 - protein, 34 aa, Artificial Sequence
  Quasi-synthetic sequence derived from human genome
LLKIVNFSRLIFHHLKRKAKSVVLVIVLGSLFFL

SEQ ID NO: 26370 - protein, 34 aa, Artificial Sequence
  Quasi-synthetic sequence derived from human genome
LGLLVAGVLVLLVSLGVAIHLCCRRRRARLRFMK

SEQ ID NO: 26371 - protein, 34 aa, Artificial Sequence
  Quasi-synthetic sequence derived from human genome
GGWRFIRVFIKTIRRDIFGGLVLLKVKAKVRQCL

SEQ ID NO: 26372 - protein, 34 aa, Artificial Sequence
  Quasi-synthetic sequence derived from human genome
VKAKTKRRLVLGLREVLKHLKLKKLKCVIISPNC

SEQ ID NO: 26373 - protein, 34 aa, Artificial Sequence
  Quasi-synthetic sequence derived from human genome
IRLRLSKLRRCVQWLKVMGLFAFVVLCSILFSLY

SEQ ID NO: 26374 - protein, 34 aa, Artificial Sequence
  Quasi-synthetic sequence derived from human genome
KITKRNNGQLMKTIIRKINKMKTLKRKKLLNQIL

SEQ ID NO: 26375 - protein, 34 aa, Artificial Sequence
  Quasi-synthetic sequence derived from human genome
LFRRFGRQRKIGGRGRIISPYRTPVLRRHRYSIF

SEQ ID NO: 26376 - protein, 34 aa, Artificial Sequence
  Quasi-synthetic sequence derived from human genome
RLARIGRILRLIRGAKGIRTLLFALMMSLPALFN

SEQ ID NO: 26377 - protein, 34 aa, Artificial Sequence
  Quasi-synthetic sequence derived from human genome
KFYIHAIGIGKCKRRIVKCGKLHKKGRKLCVYAF

SEQ ID NO: 26378 - protein, 34 aa, Artificial Sequence
  Quasi-synthetic sequence derived from human genome
GFLLACVATVLFIITKCCLFCFWKFARKGKKGKR

SEQ ID NO: 26379 - protein, 34 aa, Artificial Sequence
  Quasi-synthetic sequence derived from human genome
WRVLHALLCLHRTLTSWLRVRFGTWNWIWRRCCR

SEQ ID NO: 26380 - protein, 34 aa, Artificial Sequence
  Quasi-synthetic sequence derived from human genome
FAVMLSILSLIGIFNRSFRTGIKRRILLLIPKWL

SEQ ID NO: 26381 - protein, 34 aa, Artificial Sequence
  Quasi-synthetic sequence derived from human genome
LYKRYGGFLRRIRPKLKWDNQKRYGGFLRRQFKV

SEQ ID NO: 26382 - protein, 34 aa, Artificial Sequence
  Quasi-synthetic sequence derived from human genome
LFLILLATAVILGSAVLLFHFCIFHRRKMKAIRR

SEQ ID NO: 26383 - protein, 34 aa, Artificial Sequence
  Quasi-synthetic sequence derived from human genome
KFKLFTLVSACIPVFRLARRRKKILFYCHFPDLL

SEQ ID NO: 26384 - protein, 34 aa, Artificial Sequence
  Quasi-synthetic sequence derived from human genome
LRKTFWFFFQRHKLKGTSFLLGGVVIVLLRWPLL

SEQ ID NO: 26385 - protein, 34 aa, Artificial Sequence
  Quasi-synthetic sequence derived from human genome
KLFVVTAVSAISVIFLAHHFKRKRGKKKGKILPW

SEQ ID NO: 26386 - protein, 34 aa, Artificial Sequence
  Quasi-synthetic sequence derived from human genome
MSRLRHPRTRWKNWWVRGILTLAMIAFFFIIIYL

SEQ ID NO: 26387 - protein, 34 aa, Artificial Sequence
  Quasi-synthetic sequence derived from human genome
KYLKVFYKFLNSNRPKIRHTEKKSFKCKKRVKLF

SEQ ID NO: 26388 - protein, 34 aa, Artificial Sequence
  Quasi-synthetic sequence derived from human genome
ALLLKRFLLARRSRRGLFAQIVLPALFVGLALVF

SEQ ID NO: 26389 - protein, 34 aa, Artificial Sequence
  Quasi-synthetic sequence derived from human genome
RGVGKVPRKKVNVKVFIIIAVFFICFVPFHFARI

SEQ ID NO: 26390 - protein, 34 aa, Artificial Sequence
  Quasi-synthetic sequence derived from human genome
ISIVDPWIFIIFRSPVFRIFFHKIFIRPLRYRSR

SEQ ID NO: 26391 - protein, 34 aa, Artificial Sequence
  Quasi-synthetic sequence derived from human genome
LLRKLGVKLVQRLGLTFLKPKVAAWRYQRGCRSL

SEQ ID NO: 26392 - protein, 34 aa, Artificial Sequence
  Quasi-synthetic sequence derived from human genome
KMKKKTFKGLIRIFRKGVIAVLAANRLKILGQSC

SEQ ID NO: 26393 - protein, 34 aa, Artificial Sequence
  Quasi-synthetic sequence derived from human genome
YTGIIKILLRRPNEKKSKAVRLIFVIMIIFFLFW

SEQ ID NO: 26394 - protein, 34 aa, Artificial Sequence
  Quasi-synthetic sequence derived from human genome
RVAKMGLILAIRSILLVIPFPFTLRRLKYCQKNL

SEQ ID NO: 26395 - protein, 34 aa, Artificial Sequence
  Quasi-synthetic sequence derived from human genome
FRILRIFKLIAPKLLQIIDKRMSHQKTFWYGILK

SEQ ID NO: 26396 - protein, 34 aa, Artificial Sequence
  Quasi-synthetic sequence derived from human genome
RRYSTRQRFLKLKYYSIILQSRIRMIIAVTSYKR

SEQ ID NO: 26397 - protein, 34 aa, Artificial Sequence
  Quasi-synthetic sequence derived from human genome
LRALRLLRIFKVTKYWASLRNLVVSLLNSMKSII

SEQ ID NO: 26398 - protein, 34 aa, Artificial Sequence
  Quasi-synthetic sequence derived from human genome
KAKPKKQSKKKVPFWNVQNKIILFTVFLFILAVI

SEQ ID NO: 26399 - protein, 34 aa, Artificial Sequence
  Quasi-synthetic sequence derived from human genome
AVLPLALGLAITALLLLMVACRLRLVKQKLKKAR

SEQ ID NO: 26400 - protein, 34 aa, Artificial Sequence
  Quasi-synthetic sequence derived from human genome
WLAIILLIFISLFPEILLIVLKNVRRRSARVTKR

SEQ ID NO: 26401 - protein, 34 aa, Artificial Sequence
  Quasi-synthetic sequence derived from human genome
FKPSVFRCIALRWVRLLGFAIVYGTIILKLYRVL

SEQ ID NO: 26402 - protein, 34 aa, Artificial Sequence
  Quasi-synthetic sequence derived from human genome
LFLCLFFYNCYKGYLPRQCLKFRSALLIGKKKPK

SEQ ID NO: 26403 - protein, 34 aa, Artificial Sequence
  Quasi-synthetic sequence derived from human genome
LVLLLLFMMTVFFAKKLYLLKTENTKLRRTNKFR

SEQ ID NO: 26404 - protein, 34 aa, Artificial Sequence
  Quasi-synthetic sequence derived from human genome
YWKGFQTRKRLKKLPSAVIALQRSFRSKRSKMLL

SEQ ID NO: 26405 - protein, 34 aa, Artificial Sequence
  Quasi-synthetic sequence derived from human genome
LKTYLRRFREMKPRVLQRWSRQILRGLHFLHSRV

SEQ ID NO: 26406 - protein, 34 aa, Artificial Sequence
  Quasi-synthetic sequence derived from human genome
PSLRIARFRFRAFHFLNRFPSVYLRCKMVVCRAY

SEQ ID NO: 26407 - protein, 34 aa, Artificial Sequence
  Quasi-synthetic sequence derived from human genome
VTLIILAVVGGVIGLLILILLIKKLIIFILKKTR

SEQ ID NO: 26408 - protein, 34 aa, Artificial Sequence
  Quasi-synthetic sequence derived from human genome
KKIRKQMKLLLLLLLLSCAAWLTYVHLGLVRQGR

SEQ ID NO: 26409 - protein, 34 aa, Artificial Sequence
  Quasi-synthetic sequence derived from human genome
RLARIGRILRLIKGAKGIRTLLFALMMSLPALFN

SEQ ID NO: 26410 - protein, 34 aa, Artificial Sequence
  Quasi-synthetic sequence derived from human genome
LKSARYFLWHTYRWLLLKLLLLLLLLLLLALFLY

SEQ ID NO: 26411 - protein, 34 aa, Artificial Sequence
  Quasi-synthetic sequence derived from human genome
YLTIVCKLQRNRLAKTKKPFKIIVTIIITFFLCW

SEQ ID NO: 26412 - protein, 34 aa, Artificial Sequence
  Quasi-synthetic sequence derived from human genome
LVLCLRLLQSRCPRVLPKKLQNWNFLPLWMRSLK

SEQ ID NO: 26413 - protein, 34 aa, Artificial Sequence
  Quasi-synthetic sequence derived from human genome
GVCFLGVAVLVSILAGCLLNRRRAARRRRKRLRQ

SEQ ID NO: 26414 - protein, 34 aa, Artificial Sequence
  Quasi-synthetic sequence derived from human genome
RALTVLMVVSGAVLVYFVVRTVRMRRRNRKTRRY

SEQ ID NO: 26415 - protein, 34 aa, Artificial Sequence
  Quasi-synthetic sequence derived from human genome
FAKSNTVYNPVIYVFMIRKFRRSLLQLLCLRLLR

SEQ ID NO: 26416 - protein, 34 aa, Artificial Sequence
  Quasi-synthetic sequence derived from human genome
LIQAMWRRYRAKKYLCKVKAACKIQAWYRCWRAH

SEQ ID NO: 26417 - protein, 34 aa, Artificial Sequence
  Quasi-synthetic sequence derived from human genome
RALLTAVTNVLIFFWCLAFLWGLLILLKYRWRKL

SEQ ID NO: 26418 - protein, 34 aa, Artificial Sequence
  Quasi-synthetic sequence derived from human genome
KWRLPRISARAPYRLRRLRRHTYWPPRRPVAASR

SEQ ID NO: 26419 - protein, 34 aa, Artificial Sequence
  Quasi-synthetic sequence derived from human genome
GLLILLRLWRVARIINGIIISVKTRSERQLLRLK

SEQ ID NO: 26420 - protein, 34 aa, Artificial Sequence
  Quasi-synthetic sequence derived from human genome
LFQMPLFLKLFICFIFIRSSPTIVSNKRVSKRKF

SEQ ID NO: 26421 - protein, 34 aa, Artificial Sequence
  Quasi-synthetic sequence derived from human genome
FCLCSLVGILHLQRALVLRRKRKRMTDPTRRFFK

SEQ ID NO: 26422 - protein, 34 aa, Artificial Sequence
  Quasi-synthetic sequence derived from human genome
AFVLLLSGALAYCLALQLYVRRRKKLPSVLLFKK

SEQ ID NO: 26423 - protein, 34 aa, Artificial Sequence
  Quasi-synthetic sequence derived from human genome
LLRQKLKKVFQQHYTNKIRALRNRLIVLLLECKR

SEQ ID NO: 26424 - protein, 34 aa, Artificial Sequence
  Quasi-synthetic sequence derived from human genome
LKSIKYLICTRYKWLIIKIVLALLGLLMLGLFLY

SEQ ID NO: 26425 - protein, 34 aa, Artificial Sequence
  Quasi-synthetic sequence derived from human genome
KAAINLAKLKLFRHYYVLIVCYIYFTRIIAFLLK

SEQ ID NO: 26426 - protein, 34 aa, Artificial Sequence
  Quasi-synthetic sequence derived from human genome
LLVMAICYTGIIKTLLRCPSKKKYKAIRLIFVIM

SEQ ID NO: 26427 - protein, 34 aa, Artificial Sequence
  Quasi-synthetic sequence derived from human genome
RQKCPPWWYRFAHKFLIWNCSPYWIKFKKCIYFI

SEQ ID NO: 26428 - protein, 34 aa, Artificial Sequence
  Quasi-synthetic sequence derived from human genome
IMSKFKLLSSLPHWRRIAQKIIREPRKKRVPKKP

SEQ ID NO: 26429 - protein, 34 aa, Artificial Sequence
  Quasi-synthetic sequence derived from human genome
FFIFLKILKLLISKLKAHQMCFRDYKYRLAKSTL

SEQ ID NO: 26430 - protein, 34 aa, Artificial Sequence
  Quasi-synthetic sequence derived from human genome
FIVPFAIIGLCYSLIVRVLVRAHRHRGLRPRRQK

SEQ ID NO: 26431 - protein, 34 aa, Artificial Sequence
  Quasi-synthetic sequence derived from human genome
LLKKKYPLAKYLCVLLIVAGVALFMYKPKKVVGI

SEQ ID NO: 26432 - protein, 34 aa, Artificial Sequence
  Quasi-synthetic sequence derived from human genome
RRHYYLLRQFKIFSDFRMNKAFVTWKLNVKRIKT

SEQ ID NO: 26433 - protein, 34 aa, Artificial Sequence
  Quasi-synthetic sequence derived from human genome
LPKTPKMLKMSKGLDARSKRWLKIIWRRHGIWPL

SEQ ID NO: 26434 - protein, 34 aa, Artificial Sequence
  Quasi-synthetic sequence derived from human genome
SKGKDINTIKSLRVLRVLRPLKTIKRLPKLKAVF

SEQ ID NO: 26435 - protein, 34 aa, Artificial Sequence
  Quasi-synthetic sequence derived from human genome
ITNRPKGFTRFRSAVRVSIAISRMKFLVRRWHRV

SEQ ID NO: 26436 - protein, 34 aa, Artificial Sequence
  Quasi-synthetic sequence derived from human genome
KVCRGYLVKMGGKIKSWKKRWFVFDRLKRTLSYY

SEQ ID NO: 26437 - protein, 34 aa, Artificial Sequence
  Quasi-synthetic sequence derived from human genome
RLLFRIGYSLYTRTWLGYLFYRQQLRRARNRYPK

SEQ ID NO: 26438 - protein, 34 aa, Artificial Sequence
  Quasi-synthetic sequence derived from human genome
FFIFIMSLLLISGQRPVNLTMRRKLRKHNCLQRR

SEQ ID NO: 26439 - protein, 34 aa, Artificial Sequence
  Quasi-synthetic sequence derived from human genome
AIMSVFPVVMYFWKRFCFWKATRSYLQYRGKKFK

SEQ ID NO: 26440 - protein, 34 aa, Artificial Sequence
  Quasi-synthetic sequence derived from human genome
IYRHLRRFILSVIVFGSIVLLMLWLPIRIIKSVL

SEQ ID NO: 26441 - protein, 34 aa, Artificial Sequence
  Quasi-synthetic sequence derived from human genome
AKLLAKKRVVRMLLVIVVLFFLCWLPVYSANTWR

SEQ ID NO: 26442 - protein, 34 aa, Artificial Sequence
  Quasi-synthetic sequence derived from human genome
KTWRVHAIFKNVKMKKKIIKDQKLLVIVGGMLLI

SEQ ID NO: 26443 - protein, 34 aa, Artificial Sequence
  Quasi-synthetic sequence derived from human genome
LFQGPALGLRNHLGRKLRRRKKKKAKRTTNWKII

SEQ ID NO: 26444 - protein, 34 aa, Artificial Sequence
  Quasi-synthetic sequence derived from human genome
RPHLPGKKKIRWDPVRRRFIQSCPIIRIPNRFLR

SEQ ID NO: 26445 - protein, 34 aa, Artificial Sequence
  Quasi-synthetic sequence derived from human genome
IRASLTFNRGFKAGRNMRRKLFGVLRLKCHSLFL

SEQ ID NO: 26446 - protein, 34 aa, Artificial Sequence
  Quasi-synthetic sequence derived from human genome
MRRLTRRLVLPVFGVLWITVLLFFWVTKRKLEVP

SEQ ID NO: 26447 - protein, 34 aa, Artificial Sequence
  Quasi-synthetic sequence derived from human genome
RILINLMKYLQKWKRYRPLWKLDKAIVMEKFAAK

SEQ ID NO: 26448 - protein, 34 aa, Artificial Sequence
  Quasi-synthetic sequence derived from human genome
LKKKLFLTLKENEKLRKRLQAQRLVMRRMSSRLR

SEQ ID NO: 26449 - protein, 34 aa, Artificial Sequence
  Quasi-synthetic sequence derived from human genome
RRGRLARCWARCRDWRRMALVSALLLMLFCVALW

SEQ ID NO: 26450 - protein, 34 aa, Artificial Sequence
  Quasi-synthetic sequence derived from human genome
LGLLVAGVLVLLVSLGVAMHLCCRRRRARLRFMK

SEQ ID NO: 26451 - protein, 34 aa, Artificial Sequence
  Quasi-synthetic sequence derived from human genome
MLRMIRKHVRKNYMKFKAKFSLIQFHRIIESAIL

SEQ ID NO: 26452 - protein, 34 aa, Artificial Sequence
  Quasi-synthetic sequence derived from human genome
MGVLVFQGTTKINTFNWSKVRKLSFKRKRFLIKL

SEQ ID NO: 26453 - protein, 34 aa, Artificial Sequence
  Quasi-synthetic sequence derived from human genome
FYVYGARLYCLKIHGLSSLWRLFRGKKWNVLRQR

SEQ ID NO: 26454 - protein, 34 aa, Artificial Sequence
  Quasi-synthetic sequence derived from human genome
ISLRFKRTHIKMKKQPKGYGLRCHRAIITICRLI

SEQ ID NO: 26455 - protein, 34 aa, Artificial Sequence
  Quasi-synthetic sequence derived from human genome
ARLFRIKCVTRIQAYWRGCVVRKWYRNLRKTVPP

SEQ ID NO: 26456 - protein, 34 aa, Artificial Sequence
  Quasi-synthetic sequence derived from human genome
AKKAGLLMALARLCFLLGRLCSRRLKLSQARVYF

SEQ ID NO: 26457 - protein, 34 aa, Artificial Sequence
  Quasi-synthetic sequence derived from human genome
LMMLVCGLVWVPIIKKKQKHRQKSNFLRSLKSFF

SEQ ID NO: 26458 - protein, 34 aa, Artificial Sequence
  Quasi-synthetic sequence derived from human genome
HLLKIKNTFCLWKRLIKLKDNHCEQLRVKIRKLK

SEQ ID NO: 26459 - protein, 34 aa, Artificial Sequence
  Quasi-synthetic sequence derived from human genome
FLRLKRKFIQMRRPFLERRDLIIQHIPGFWVKAF

SEQ ID NO: 26460 - protein, 34 aa, Artificial Sequence
  Quasi-synthetic sequence derived from human genome
AVVAILLCILTITVITLLIFLRRRLRKQARAHGK

SEQ ID NO: 26461 - protein, 34 aa, Artificial Sequence
  Quasi-synthetic sequence derived from human genome
VLLALCLLLPLLLLGGWKRWRRGRAARHVVAVVL

SEQ ID NO: 26462 - protein, 34 aa, Artificial Sequence
  Quasi-synthetic sequence derived from human genome
WRRRKSLWLALSASWLLLVLLGGFSLLRLALPPR

SEQ ID NO: 26463 - protein, 34 aa, Artificial Sequence
  Quasi-synthetic sequence derived from human genome
FRFWPFLVIIVILSALFLGTLACFCVWRRKRKEK

SEQ ID NO: 26464 - protein, 34 aa, Artificial Sequence
  Quasi-synthetic sequence derived from human genome
LVRKAFRHRLWAVLTVQAYARGMIARRLHQRLRA

SEQ ID NO: 26465 - protein, 34 aa, Artificial Sequence
  Quasi-synthetic sequence derived from human genome
RRRRSRSVVRRRSFSISPVRLRRSRTPLRRRFSR

SEQ ID NO: 26466 - protein, 34 aa, Artificial Sequence
  Quasi-synthetic sequence derived from human genome
VVTLFCYCRISRRLRRPPHVGRARRNSLRIIFAI

SEQ ID NO: 26467 - protein, 34 aa, Artificial Sequence
  Quasi-synthetic sequence derived from human genome
RLVVYKIVYMFLFLLCLTLFQVYYSLWRKLLKAF

SEQ ID NO: 26468 - protein, 34 aa, Artificial Sequence
  Quasi-synthetic sequence derived from human genome
SFKDCIPRSFRRHIRQHSALTRLRLRNVFRRFLR

SEQ ID NO: 26469 - protein, 34 aa, Artificial Sequence
  Quasi-synthetic sequence derived from human genome
RRFRSLRHKIILLQSRARGYLARQRYQQMRRSLV

SEQ ID NO: 26470 - protein, 34 aa, Artificial Sequence
  Quasi-synthetic sequence derived from human genome
INRPRTELKKKLFKRRRVLNRERRLRHRVVGAVI

SEQ ID NO: 26471 - protein, 34 aa, Artificial Sequence
  Quasi-synthetic sequence derived from human genome
WKPSPLIKPFGARKKRSWYLTWKYKLTNQRALRR

SEQ ID NO: 26472 - protein, 34 aa, Artificial Sequence
  Quasi-synthetic sequence derived from human genome
FICPFVLLLLLLISLLCLYWKARKLSTLRSNTRK

SEQ ID NO: 26473 - protein, 34 aa, Artificial Sequence
  Quasi-synthetic sequence derived from human genome
IRNMSWPRLIRKLRCYLKEMKNLRKLVFSRCLQN

SEQ ID NO: 26474 - protein, 34 aa, Artificial Sequence
  Quasi-synthetic sequence derived from human genome
IRSWLTRKHIQRLHAAATVIKRAWQKWRIRMACL

SEQ ID NO: 26475 - protein, 34 aa, Artificial Sequence
  Quasi-synthetic sequence derived from human genome
KHFLTLKMNISVLVLPLFIFTFLYVQMRKTLRFR

SEQ ID NO: 26476 - protein, 34 aa, Artificial Sequence
  Quasi-synthetic sequence derived from human genome
ALAAQLALLGLGLLHALLLVLLLCRLRRLRARAR

SEQ ID NO: 26477 - protein, 34 aa, Artificial Sequence
  Quasi-synthetic sequence derived from human genome
IRNMSWPRLIRKLRCYLKEMKNLRKLVFSRCHHY

SEQ ID NO: 26478 - protein, 34 aa, Artificial Sequence
  Quasi-synthetic sequence derived from human genome
LWVRRKAGYKKKLWKKTPARKKRLREFVFCNKTQ

SEQ ID NO: 26479 - protein, 34 aa, Artificial Sequence
  Quasi-synthetic sequence derived from human genome
RHKLLKLSVLLPLIFTILLLLLVAASLLAWRMMK

SEQ ID NO: 26480 - protein, 34 aa, Artificial Sequence
  Quasi-synthetic sequence derived from human genome
KRFNKEKLGLLLLTFLGIVAAVLVKKYQAVLRRK

SEQ ID NO: 26481 - protein, 34 aa, Artificial Sequence
  Quasi-synthetic sequence derived from human genome
LRALLLWGRRLRPLLRAPALAAVPGGKPILCPRR

SEQ ID NO: 26482 - protein, 34 aa, Artificial Sequence
  Quasi-synthetic sequence derived from human genome
WKRYQPCWVLMVSVLLHHWKALKKVNMKLLVNIR

SEQ ID NO: 26483 - protein, 34 aa, Artificial Sequence
  Quasi-synthetic sequence derived from human genome
MLRTLLRRRLFSYPTKYYFMVLVLSLITFSVLRI

SEQ ID NO: 26484 - protein, 34 aa, Artificial Sequence
  Quasi-synthetic sequence derived from human genome
QKVARKFWWKNVKMIVLICVIVFIIILFIVLFAT

SEQ ID NO: 26485 - protein, 34 aa, Artificial Sequence
  Quasi-synthetic sequence derived from human genome
RALWFWAFSLQAKVWATWLAFVLERRRKKARLQW

SEQ ID NO: 26486 - protein, 34 aa, Artificial Sequence
  Quasi-synthetic sequence derived from human genome
FRPGKVLRFLHLFGPGKNVPSVWRSARRKRKKHR

SEQ ID NO: 26487 - protein, 34 aa, Artificial Sequence
  Quasi-synthetic sequence derived from human genome
PRPVLLRGARAALLLLLPPRLLARPSLLLRRSLS

SEQ ID NO: 26488 - protein, 34 aa, Artificial Sequence
  Quasi-synthetic sequence derived from human genome
HFLVHWFKKLSQKRFKQLVERLLQFISLRLFPAK

SEQ ID NO: 26489 - protein, 34 aa, Artificial Sequence
  Quasi-synthetic sequence derived from human genome
GCTLLHCFVILPVFLTFFPPSKKHHKKKKRAKRK

SEQ ID NO: 26490 - protein, 34 aa, Artificial Sequence
  Quasi-synthetic sequence derived from human genome
RPRGKLAGLLRTFMRSRPSRQRLRQRGILRQRVF

SEQ ID NO: 26491 - protein, 34 aa, Artificial Sequence
  Quasi-synthetic sequence derived from human genome
AIAAAIALLALTALLLVAMICRRRRRRKKARGPP

SEQ ID NO: 26492 - protein, 34 aa, Artificial Sequence
  Quasi-synthetic sequence derived from human genome
RLRRVAERVAARVQRRPWGAWLSARLWKWLKSPR

SEQ ID NO: 26493 - protein, 34 aa, Artificial Sequence
  Quasi-synthetic sequence derived from human genome
LFRKWKAFSVWRKNVRSKKITGCQKSLQKNLFIV

SEQ ID NO: 26494 - protein, 34 aa, Artificial Sequence
  Quasi-synthetic sequence derived from human genome
FWARRASRTRLAAWARRALLSLRSPKARRGKARR

SEQ ID NO: 26495 - protein, 34 aa, Artificial Sequence
  Quasi-synthetic sequence derived from human genome
ALWRQQVCAIAKVRFLKLKKERKSLWTILLLFGI

SEQ ID NO: 26496 - protein, 34 aa, Artificial Sequence
  Quasi-synthetic sequence derived from human genome
LKEGLRAWKRIFWRQILLTLGLLGLFLYGLPKFR

SEQ ID NO: 26497 - protein, 34 aa, Artificial Sequence
  Quasi-synthetic sequence derived from human genome
LSRKILRLITIRKLFTAIGVLFPSVILVSLPWVR

SEQ ID NO: 26498 - protein, 34 aa, Artificial Sequence
  Quasi-synthetic sequence derived from human genome
WAIFRPGTSFGISVLRALRLLRIFKITKYWASLR

SEQ ID NO: 26499 - protein, 34 aa, Artificial Sequence
  Quasi-synthetic sequence derived from human genome
VMGGLIALLLLLLVFTVALYAQRRWQKRRRIPQK

SEQ ID NO: 26500 - protein, 34 aa, Artificial Sequence
  Quasi-synthetic sequence derived from human genome
PFLLLILLCMSLLLFQVIRLYQRRRWTIRAMHLF

SEQ ID NO: 26501 - protein, 34 aa, Artificial Sequence
  Quasi-synthetic sequence derived from human genome
VHRCLGVLRPLRSLRWGRARYARRVAGAVWVLVL

SEQ ID NO: 26502 - protein, 34 aa, Artificial Sequence
  Quasi-synthetic sequence derived from human genome
MLPCTTRLKSMLRLLLVKKPSVRSLALKLLAFHL

SEQ ID NO: 26503 - protein, 34 aa, Artificial Sequence
  Quasi-synthetic sequence derived from human genome
FVLKYITIALKCLIVALPKIILAVKSKGKFYLVI

SEQ ID NO: 26504 - protein, 34 aa, Artificial Sequence
  Quasi-synthetic sequence derived from human genome
VRFVVRKTVQRSVAKGSRRCKKRMFKFHQMKHIF

SEQ ID NO: 26505 - protein, 34 aa, Artificial Sequence
  Quasi-synthetic sequence derived from human genome
LRLRVHGPFFPRILRRRKGKREFGKTITHIVAKM

SEQ ID NO: 26506 - protein, 34 aa, Artificial Sequence
  Quasi-synthetic sequence derived from human genome
KKNIKALYIVHPTMFIKTLLILFKPLISFKFGQK

SEQ ID NO: 26507 - protein, 34 aa, Artificial Sequence
  Quasi-synthetic sequence derived from human genome
RYVGYFAQVKHLYNWNLPPRRILFIKRFIIYSIR

SEQ ID NO: 26508 - protein, 34 aa, Artificial Sequence
  Quasi-synthetic sequence derived from human genome
ATLVVLALAMVPILLLGTPLHLLHRHRRRLRRRP

SEQ ID NO: 26509 - protein, 34 aa, Artificial Sequence
  Quasi-synthetic sequence derived from human genome
LSLKLAKIILALKVSRKNLLNVCKLIFKISRNEK

SEQ ID NO: 26510 - protein, 34 aa, Artificial Sequence
  Quasi-synthetic sequence derived from human genome
IIQFIRHWRQWNRIFRWKCHDIVKSKVFYWLVIL

SEQ ID NO: 26511 - protein, 34 aa, Artificial Sequence
  Quasi-synthetic sequence derived from human genome
KKVLNLLKGAFPARLKKVLIVGAPIWFRVPYSII

SEQ ID NO: 26512 - protein, 34 aa, Artificial Sequence
  Quasi-synthetic sequence derived from human genome
RKSALHLFRLGNAMLRIVRSKARPLLHVMRCWSL

SEQ ID NO: 26513 - protein, 34 aa, Artificial Sequence
  Quasi-synthetic sequence derived from human genome
RGFLARRRYRKMLEEHKAVILQKYARAWLARRRF

SEQ ID NO: 26514 - protein, 34 aa, Artificial Sequence
  Quasi-synthetic sequence derived from human genome
RKRTAKRAALMILTVWTISIFISMPPLFWRSHRR

SEQ ID NO: 26515 - protein, 34 aa, Artificial Sequence
  Quasi-synthetic sequence derived from human genome
LFARHRTKMRRKKRFAKQGNKWYKQHLSYRLVNW

SEQ ID NO: 26516 - protein, 34 aa, Artificial Sequence
  Quasi-synthetic sequence derived from human genome
QLMQLYSARQRRRLNRGLRRKQHSLLKRLRKAKK

SEQ ID NO: 26517 - protein, 34 aa, Artificial Sequence
  Quasi-synthetic sequence derived from human genome
RLRQKVAVKKLSRPFQSLIHARRTYRELRLLKHL

SEQ ID NO: 26518 - protein, 34 aa, Artificial Sequence
  Quasi-synthetic sequence derived from human genome
VLITGYIQICFWVIAAARQIQKMRKFYFRRIMRM

SEQ ID NO: 26519 - protein, 34 aa, Artificial Sequence
  Quasi-synthetic sequence derived from human genome
LRLFRMLRIFKLGKYWPTFQILMWSLSNSWVALK

SEQ ID NO: 26520 - protein, 34 aa, Artificial Sequence
  Quasi-synthetic sequence derived from human genome
MQKKCYGKIKASVLLIQAFVRGWKARKNYRKYFR

SEQ ID NO: 26521 - protein, 34 aa, Artificial Sequence
  Quasi-synthetic sequence derived from human genome
PKRLLLVLVSAFFIFWSPFNVVLLVHLWRRVMLK

SEQ ID NO: 26522 - protein, 34 aa, Artificial Sequence
  Quasi-synthetic sequence derived from human genome
AAYIFRKLRLDRAFHFTAMPKLLSYRMKKKIHRA

SEQ ID NO: 26523 - protein, 34 aa, Artificial Sequence
  Quasi-synthetic sequence derived from human genome
KILGVLRVLRLLRTLRPLRVISRAPGLKLVVETL

SEQ ID NO: 26524 - protein, 34 aa, Artificial Sequence
  Quasi-synthetic sequence derived from human genome
RNVKFPLPIYKSKKGWTAYKLQLFKMFPIILAIL

SEQ ID NO: 26525 - protein, 34 aa, Artificial Sequence
  Quasi-synthetic sequence derived from human genome
IPTIKFRHCSLLRNRRCTVAYLYDRLLRIRALRW

SEQ ID NO: 26526 - protein, 34 aa, Artificial Sequence
  Quasi-synthetic sequence derived from human genome
YWRLTWRVVSPLLLTIFVAYIILLFWKPLRYKAW

SEQ ID NO: 26527 - protein, 34 aa, Artificial Sequence
  Quasi-synthetic sequence derived from human genome
RKLWWLPAHLPRFVRIVLSTLPNKHGILQKLRCL

SEQ ID NO: 26528 - protein, 34 aa, Artificial Sequence
  Quasi-synthetic sequence derived from human genome
RKGVWLRLRKILFCVLGLYIAIPFLIKLCPGIQA

SEQ ID NO: 26529 - protein, 34 aa, Artificial Sequence
  Quasi-synthetic sequence derived from human genome
LLCKNCLKKWRMKRQTLLEWLFSFLLVLFLYLFF

SEQ ID NO: 26530 - protein, 34 aa, Artificial Sequence
  Quasi-synthetic sequence derived from human genome
LSFSWVLLALALLAWCRRSRGLKALRLCRALALL

SEQ ID NO: 26531 - protein, 34 aa, Artificial Sequence
  Quasi-synthetic sequence derived from human genome
LFALPFGRTAKPAHIAKVKMKFRFLGKLMAKAIM

SEQ ID NO: 26532 - protein, 34 aa, Artificial Sequence
  Quasi-synthetic sequence derived from human genome
PKVRKVLQLLRLRQIFNGTFVKLNKASINMLRIV

SEQ ID NO: 26533 - protein, 34 aa, Artificial Sequence
  Quasi-synthetic sequence derived from human genome
VYRKYICTSFYPWVNILKISFKRKKFFIHQRQKQ

SEQ ID NO: 26534 - protein, 34 aa, Artificial Sequence
  Quasi-synthetic sequence derived from human genome
PLLLMILKPVQKLFAIIVGRGIRKWWQALPPNKK

SEQ ID NO: 26535 - protein, 34 aa, Artificial Sequence
  Quasi-synthetic sequence derived from human genome
RCYRKYKQLTWIALKFALYKKMTQAAILIQSKFR

SEQ ID NO: 26536 - protein, 34 aa, Artificial Sequence
  Quasi-synthetic sequence derived from human genome
RVLRMMRIFWVIKLARHFIGLQTLGLTLKRCYRE

SEQ ID NO: 26537 - protein, 34 aa, Artificial Sequence
  Quasi-synthetic sequence derived from human genome
WLMERGGLGKPRGPRHRGLLRVRLGRFISRLLLW

SEQ ID NO: 26538 - protein, 34 aa, Artificial Sequence
  Quasi-synthetic sequence derived from human genome
CWKFFIEKVRRQLKVILCFSPVGSVLRVRARKFP

SEQ ID NO: 26539 - protein, 34 aa, Artificial Sequence
  Quasi-synthetic sequence derived from human genome
RLFRIKCVTRIQAYWRGCVVRKWYRNLRKTVPPT

SEQ ID NO: 26540 - protein, 34 aa, Artificial Sequence
  Quasi-synthetic sequence derived from human genome
LEQSRARLIPIIVLLLQKAWRGTLARWRCRRLRA

SEQ ID NO: 26541 - protein, 34 aa, Artificial Sequence
  Quasi-synthetic sequence derived from human genome
LRRFREMKPRVLQRWSRQILRGLHFLHSRVPPIL

SEQ ID NO: 26542 - protein, 34 aa, Artificial Sequence
  Quasi-synthetic sequence derived from human genome
LLSSRRARRIPKLVQRINSIYNAKRGKKRLKKLS

SEQ ID NO: 26543 - protein, 34 aa, Artificial Sequence
  Quasi-synthetic sequence derived from human genome
QKKKKVVKYGMGGMIIVLLICIVWFPLLFMSLIK

SEQ ID NO: 26544 - protein, 34 aa, Artificial Sequence
  Quasi-synthetic sequence derived from human genome
SCLVLFPRFLGTAFMLWLLDFLCIRKHFLGRRRR

SEQ ID NO: 26545 - protein, 34 aa, Artificial Sequence
  Quasi-synthetic sequence derived from human genome
KKMSKLSRSARAGVIFPVGRLMRYLKKGTFKYRI

SEQ ID NO: 26546 - protein, 34 aa, Artificial Sequence
  Quasi-synthetic sequence derived from human genome
RLWLHVLPTLPGTLCLRIFRWGPRRRRQGSRTLL

SEQ ID NO: 26547 - protein, 34 aa, Artificial Sequence
  Quasi-synthetic sequence derived from human genome
RWLRIKLWISTVALALVPFLLLIPKFARWFSVPW

SEQ ID NO: 26548 - protein, 34 aa, Artificial Sequence
  Quasi-synthetic sequence derived from human genome
KVKKIWQKQFRWPKNRLQILKFCKAREDLLKIQK

SEQ ID NO: 26549 - protein, 34 aa, Artificial Sequence
  Quasi-synthetic sequence derived from human genome
VKQRRDLLHLCCKKLKILGMPFRNIRSILKMVNL

SEQ ID NO: 26550 - protein, 34 aa, Artificial Sequence
  Quasi-synthetic sequence derived from human genome
FRALLFVPRRAPFDLFENRKKKNNIKLYVRRVFI

SEQ ID NO: 26551 - protein, 34 aa, Artificial Sequence
  Quasi-synthetic sequence derived from human genome
FKCLYYLIWKNYKKYIIIAFILIILIIFLVLFIY

SEQ ID NO: 26552 - protein, 34 aa, Artificial Sequence
  Quasi-synthetic sequence derived from human genome
RGRLLRRTLIRYANLASVLVLRSVSTRVLKRFPT

SEQ ID NO: 26553 - protein, 34 aa, Artificial Sequence
  Quasi-synthetic sequence derived from human genome
KFRRRTCIILALFILFIFSLMMGLKMLRPNTATF

SEQ ID NO: 26554 - protein, 34 aa, Artificial Sequence
  Quasi-synthetic sequence derived from human genome
LLRRWKHWLLLLGICCPKPHGRVSSRLRLSRSLG

SEQ ID NO: 26555 - protein, 34 aa, Artificial Sequence
  Quasi-synthetic sequence derived from human genome
GIMAKLLPLRALPLLFNLIKVVPRVFGRMVGKSR

SEQ ID NO: 26556 - protein, 34 aa, Artificial Sequence
  Quasi-synthetic sequence derived from human genome
RKRPLTLLQRAGLLLLLGLLGFLALLALMSRLGR

SEQ ID NO: 26557 - protein, 34 aa, Artificial Sequence
  Quasi-synthetic sequence derived from human genome
AARHSRVRRAALRLLTYLSCRFGLARVHWAFKFF

SEQ ID NO: 26558 - protein, 34 aa, Artificial Sequence
  Quasi-synthetic sequence derived from human genome
FFHLIIFAFCIAVVYITYHNKRKIFLLVQSRKWR

SEQ ID NO: 26559 - protein, 34 aa, Artificial Sequence
  Quasi-synthetic sequence derived from human genome
VYNHYLFSGCFLVVLLAILLYLLRLRRIHRRTPR

SEQ ID NO: 26560 - protein, 34 aa, Artificial Sequence
  Quasi-synthetic sequence derived from human genome
RVLPRMQARMRGFQARKRYLRRRAALGQLNTILL

SEQ ID NO: 26561 - protein, 34 aa, Artificial Sequence
  Quasi-synthetic sequence derived from human genome
LKLYRVLQLFLSRTAQRSALLSSGRLLRRLGLLL

SEQ ID NO: 26562 - protein, 34 aa, Artificial Sequence
  Quasi-synthetic sequence derived from human genome
SCPVRIRNRCVMTSRPRGVKRRWRLSRIVFRHLA

SEQ ID NO: 26563 - protein, 34 aa, Artificial Sequence
  Quasi-synthetic sequence derived from human genome
RFHARSLWTNHKRYGYKKHSYRLVKKLKLQKMKK

SEQ ID NO: 26564 - protein, 34 aa, Artificial Sequence
  Quasi-synthetic sequence derived from human genome
ALCTLRGRRCHCLPFPKRGMQRWMLPLRRGARLL

SEQ ID NO: 26565 - protein, 34 aa, Artificial Sequence
  Quasi-synthetic sequence derived from human genome
VFRQPLSSLWRSLVPLFCWLRATFWLLATKRRKQ

SEQ ID NO: 26566 - protein, 34 aa, Artificial Sequence
  Quasi-synthetic sequence derived from human genome
RLCKLLFFRIRPIFVFDGDAPLLKKQTLVKRRQR

SEQ ID NO: 26567 - protein, 34 aa, Artificial Sequence
  Quasi-synthetic sequence derived from human genome
WRILKVLLWLLAILTGLIAGKFLFHQRLFGQLLR

SEQ ID NO: 26568 - protein, 34 aa, Artificial Sequence
  Quasi-synthetic sequence derived from human genome
YRFWKTGYWASHLLRRKYHISALYVVDLKKFRRI

SEQ ID NO: 26569 - protein, 34 aa, Artificial Sequence
  Quasi-synthetic sequence derived from human genome
RRRRRAKITGRERKAMRVLPVVVGAFLLCWTPFF

SEQ ID NO: 26570 - protein, 34 aa, Artificial Sequence
  Quasi-synthetic sequence derived from human genome
ITNLKRRYSFRLHIGRNIARPWKLIYYRAKKMFD

SEQ ID NO: 26571 - protein, 34 aa, Artificial Sequence
  Quasi-synthetic sequence derived from human genome
IQIFGRKSYPMLKLVRLKLWFPRFMNVNPFPVPR

SEQ ID NO: 26572 - protein, 34 aa, Artificial Sequence
  Quasi-synthetic sequence derived from human genome
PLKTFVFFIWRRYWRTLVLLLLVLLTVFLLLVFY

SEQ ID NO: 26573 - protein, 34 aa, Artificial Sequence
  Quasi-synthetic sequence derived from human genome
WRFLRIVCKTARRDLFGLSVLIRVRLELRRHQRA

SEQ ID NO: 26574 - protein, 34 aa, Artificial Sequence
  Quasi-synthetic sequence derived from human genome
MLFLLVLVFFLMGLVGFMICHVLKKKGYRCRTSR

SEQ ID NO: 26575 - protein, 34 aa, Artificial Sequence
  Quasi-synthetic sequence derived from human genome
IKHLRKSLKIIYLNSIQQLEIRNMSWPRLIRKLR

SEQ ID NO: 26576 - protein, 34 aa, Artificial Sequence
  Quasi-synthetic sequence derived from human genome
HFRVFHLSLWRLMKKVQITKPPPNFKFAFRAMVL

SEQ ID NO: 26577 - protein, 34 aa, Artificial Sequence
  Quasi-synthetic sequence derived from human genome
KNILLRIQQIIYCHKLTIILTKWRNTARHKSKKK

SEQ ID NO: 26578 - protein, 34 aa, Artificial Sequence
  Quasi-synthetic sequence derived from human genome
KTKMAFLLVGICFLCKLCTIIFTTIAFFIYKRRL

SEQ ID NO: 26579 - protein, 34 aa, Artificial Sequence
  Quasi-synthetic sequence derived from human genome
LRARVLVTRRRVRALIAVLWAVALLSAGPFLFLV

SEQ ID NO: 26580 - protein, 34 aa, Artificial Sequence
  Quasi-synthetic sequence derived from human genome
KTRRHLKSMHSSATLIQSRFRSLLVRRRFISLKK

SEQ ID NO: 26581 - protein, 34 aa, Artificial Sequence
  Quasi-synthetic sequence derived from human genome
RRAKRKVTRMILIVAALFCLCWMPHHALILCVWF

SEQ ID NO: 26582 - protein, 34 aa, Artificial Sequence
  Quasi-synthetic sequence derived from human genome
WFHVLFYLAVGIMFLVNTVLWVTIRKELKRKKKW

SEQ ID NO: 26583 - protein, 34 aa, Artificial Sequence
  Quasi-synthetic sequence derived from human genome
AFWFCLAWCTFFLIPSIIFAVKTSKYFRPIRKRL

SEQ ID NO: 26584 - protein, 34 aa, Artificial Sequence
  Quasi-synthetic sequence derived from human genome
RRRPARTLGLLLLVVLGFLVLRRLDWSTLVPLRL

SEQ ID NO: 26585 - protein, 34 aa, Artificial Sequence
  Quasi-synthetic sequence derived from human genome
IPLVRNRRFQLCRCMNPRARKNRSQIALFQKLRF

SEQ ID NO: 26586 - protein, 34 aa, Artificial Sequence
  Quasi-synthetic sequence derived from human genome
VKQRKDLLHLCCKKLKILGMPFRNIRSILKMVNL

SEQ ID NO: 26587 - protein, 34 aa, Artificial Sequence
  Quasi-synthetic sequence derived from human genome
RLIILIRIFHLLHQKRQLEKLMRRLVSENKRRYT

SEQ ID NO: 26588 - protein, 34 aa, Artificial Sequence
  Quasi-synthetic sequence derived from human genome
KSHCFRLGRQLSKALQVNCVVRKLLVQLRRLYWW

SEQ ID NO: 26589 - protein, 34 aa, Artificial Sequence
  Quasi-synthetic sequence derived from human genome
VWNFLKRHKKKCIFLGTVLGGVYILGKYGQKKIR

SEQ ID NO: 26590 - protein, 34 aa, Artificial Sequence
  Quasi-synthetic sequence derived from human genome
RRPGRRWPASPLGMKVFRRKALVLCAGYALLLVL

SEQ ID NO: 26591 - protein, 34 aa, Artificial Sequence
  Quasi-synthetic sequence derived from human genome
RWRTRYKTIRINLGLWAASFILALPVWVYSKVIK

SEQ ID NO: 26592 - protein, 34 aa, Artificial Sequence
  Quasi-synthetic sequence derived from human genome
CWKFFIDRIRRQLKVTLCFSPVGNKLRVRSRKFP

SEQ ID NO: 26593 - protein, 34 aa, Artificial Sequence
  Quasi-synthetic sequence derived from human genome
LRYRHKRLSYQSVFLFLCLFWASLRTVLFSFYFK

SEQ ID NO: 26594 - protein, 34 aa, Artificial Sequence
  Quasi-synthetic sequence derived from human genome
LVSANFRHIFLATLACLCPVWRRRRKRPAFSRKA

SEQ ID NO: 26595 - protein, 34 aa, Artificial Sequence
  Quasi-synthetic sequence derived from human genome
PCRARLAFRNLGALLPRLHQLCCRMPRTLRRLFV

SEQ ID NO: 26596 - protein, 34 aa, Artificial Sequence
  Quasi-synthetic sequence derived from human genome
RSGKIPSRFKRSYNYKTIVKKILAKLKRARSKKL

SEQ ID NO: 26597 - protein, 34 aa, Artificial Sequence
  Quasi-synthetic sequence derived from human genome
RRLLILILKIGRRWTELIRTMESRVLLRTFCLIF

SEQ ID NO: 26598 - protein, 34 aa, Artificial Sequence
  Quasi-synthetic sequence derived from human genome
ILFMFRRLRQFRQAQPTPQYRFRKRDKVMFYGRK

SEQ ID NO: 26599 - protein, 34 aa, Artificial Sequence
  Quasi-synthetic sequence derived from human genome
KTRFLRRKVQEGRLRRKQIKFEKDLRRIWLKAGL

SEQ ID NO: 26600 - protein, 34 aa, Artificial Sequence
  Quasi-synthetic sequence derived from human genome
RKKFMITPKLIRMVTVMQAHVRGWLERKRLQRVM

SEQ ID NO: 26601 - protein, 34 aa, Artificial Sequence
  Quasi-synthetic sequence derived from human genome
LRKRDKLWGVCVSILALLPRVLRLMLQSLRVNRV

SEQ ID NO: 26602 - protein, 34 aa, Artificial Sequence
  Quasi-synthetic sequence derived from human genome
FNLPRLCIRKFFPKKKCFVFDRPVHRRKLAQLEK

SEQ ID NO: 26603 - protein, 34 aa, Artificial Sequence
  Quasi-synthetic sequence derived from human genome
IFRGNQMRLKRACIRKAKISAVAFRKAFCHHKLV

SEQ ID NO: 26604 - protein, 34 aa, Artificial Sequence
  Quasi-synthetic sequence derived from human genome
RPWPRWLGVAALGLAAVALGTVAWRRAWPRRRRR

SEQ ID NO: 26605 - protein, 34 aa, Artificial Sequence
  Quasi-synthetic sequence derived from human genome
LLSPKSSWVKRHRSSFRNRFPLLKVLILQRNKLS

SEQ ID NO: 26606 - protein, 34 aa, Artificial Sequence
  Quasi-synthetic sequence derived from human genome
PLRAPALRRLLPPLLLLLLSLPPRARAKYVRGNL

SEQ ID NO: 26607 - protein, 34 aa, Artificial Sequence
  Quasi-synthetic sequence derived from human genome
LSRALRYYYNKRILHKTKGKRFTYKFNFNKLVMP

SEQ ID NO: 26608 - protein, 34 aa, Artificial Sequence
  Quasi-synthetic sequence derived from human genome
WLRHRATQSGQRRWRHALHRRLLNRRLLLAVTPW

SEQ ID NO: 26609 - protein, 34 aa, Artificial Sequence
  Quasi-synthetic sequence derived from human genome
FLKVIGKGSFGKVLLAKRKLDGKFYAVKVLQKKI

SEQ ID NO: 26610 - protein, 34 aa, Artificial Sequence
  Quasi-synthetic sequence derived from human genome
KPRMRGLLARRLRNHMAVAFVLSLGVAALYKFRV

SEQ ID NO: 26611 - protein, 34 aa, Artificial Sequence
  Quasi-synthetic sequence derived from human genome
KYARWKPWLKPYLAICVLFNIILFLVALCCFLLR

SEQ ID NO: 26612 - protein, 34 aa, Artificial Sequence
  Quasi-synthetic sequence derived from human genome
YRPGPVRRRGKVELIKFVRVQWRRPQVEWRRRRW

SEQ ID NO: 26613 - protein, 34 aa, Artificial Sequence
  Quasi-synthetic sequence derived from human genome
SIFVWFIFISLAQTMKTLRLRKNTVKFSLYRHFK

SEQ ID NO: 26614 - protein, 34 aa, Artificial Sequence
  Quasi-synthetic sequence derived from human genome
RGRPRLRLGERGLMEPLLPPKRRLLPRVRLLPLL

SEQ ID NO: 26615 - protein, 34 aa, Artificial Sequence
  Quasi-synthetic sequence derived from human genome
AKQPAKKKRKKGLRIKGKRRRKKLILAKKFSKDL

SEQ ID NO: 26616 - protein, 34 aa, Artificial Sequence
  Quasi-synthetic sequence derived from human genome
RTLDRRLRKNLRALVVVHATWYVKAFLALLRPFI

SEQ ID NO: 26617 - protein, 34 aa, Artificial Sequence
  Quasi-synthetic sequence derived from human genome
PKRRLLPRVRLLPLLLALAVGSAFYTIWSGWHRR

SEQ ID NO: 26618 - protein, 34 aa, Artificial Sequence
  Quasi-synthetic sequence derived from human genome
ILFRATRKPLSGRTPRLVYKWFLLIYKLSYAFGV

SEQ ID NO: 26619 - protein, 34 aa, Artificial Sequence
  Quasi-synthetic sequence derived from human genome
LIEYKAAVTLQRAALKFLAKCRKKKKLFAPWRGL

SEQ ID NO: 26620 - protein, 34 aa, Artificial Sequence
  Quasi-synthetic sequence derived from human genome
KKIFVFLEHQTKVLKKRHTKEKVLRRAKRRWAPI

SEQ ID NO: 26621 - protein, 34 aa, Artificial Sequence
  Quasi-synthetic sequence derived from human genome
LLKIANFSNLLFLHLKRRVRSVILVILLGTLIFL

SEQ ID NO: 26622 - protein, 34 aa, Artificial Sequence
  Quasi-synthetic sequence derived from human genome
YFCVIFLLNVSMFIVVLVQLCRIKKKKQLGAQRK

SEQ ID NO: 26623 - protein, 34 aa, Artificial Sequence
  Quasi-synthetic sequence derived from human genome
NLAAMVWRRLLRKRWVLALVFGLSLVYFLSSTFK

SEQ ID NO: 26624 - protein, 34 aa, Artificial Sequence
  Quasi-synthetic sequence derived from human genome
SLLMNRRKFLYQFKNVRWAKGRRETYLCYVVKRR

SEQ ID NO: 26625 - protein, 34 aa, Artificial Sequence
  Quasi-synthetic sequence derived from human genome
FLNLKKTIIKFQAHVRKHQQRQKYKKMKKAAVII

SEQ ID NO: 26626 - protein, 34 aa, Artificial Sequence
  Quasi-synthetic sequence derived from human genome
RLVQASGQKAPRPAARRKARRLLKTVLMILLAFL

SEQ ID NO: 26627 - protein, 34 aa, Artificial Sequence
  Quasi-synthetic sequence derived from human genome
KKNTLKKYKIACIVLLALLVIMSLGLGLGLGLRK

SEQ ID NO: 26628 - protein, 34 aa, Artificial Sequence
  Quasi-synthetic sequence derived from human genome
KRMAKTSAGLKLILKRYKIGASRKTFWKRKKINS

SEQ ID NO: 26629 - protein, 34 aa, Artificial Sequence
  Quasi-synthetic sequence derived from human genome
KICAFLLRKKRFGQWTKLLCVIKDTKLLCYKSSK

SEQ ID NO: 26630 - protein, 34 aa, Artificial Sequence
  Quasi-synthetic sequence derived from human genome
IHLFRKPQRSFFGKLLREFRLVAADRRSWKILLF

SEQ ID NO: 26631 - protein, 34 aa, Artificial Sequence
  Quasi-synthetic sequence derived from human genome
LRTAMRRQMRRHASRRGPSRRRLGRLWNRLFHRP

SEQ ID NO: 26632 - protein, 34 aa, Artificial Sequence
  Quasi-synthetic sequence derived from human genome
ILKNKLKVRTAYPSLRLIHAVRGYWLTNKVPIKR

SEQ ID NO: 26633 - protein, 34 aa, Artificial Sequence
  Quasi-synthetic sequence derived from human genome
KLSGRLGLLGRRGFSGRLGGYWKTWIFWKTWIFW

SEQ ID NO: 26634 - protein, 34 aa, Artificial Sequence
  Quasi-synthetic sequence derived from human genome
TRTLTQKRYLVKFICLSIWGLSLLLALPVLLFRR

SEQ ID NO: 26635 - protein, 34 aa, Artificial Sequence
  Quasi-synthetic sequence derived from human genome
PFRLLWPILGGALSLTFVLGLLSGFLVWRRCRRR

SEQ ID NO: 26636 - protein, 34 aa, Artificial Sequence
  Quasi-synthetic sequence derived from human genome
LAKKMLRKALKLLNRIFPYNLISLFLHIHVEKNR

SEQ ID NO: 26637 - protein, 34 aa, Artificial Sequence
  Quasi-synthetic sequence derived from human genome
KKMLRKALKLLNRIFPYNLISLFLHIHVEKNRHF

SEQ ID NO: 26638 - protein, 34 aa, Artificial Sequence
  Quasi-synthetic sequence derived from human genome
KKAVKYQSQARKKLIIIIVLVVVLLGILALIIGL

SEQ ID NO: 26639 - protein, 34 aa, Artificial Sequence
  Quasi-synthetic sequence derived from human genome
RRQRKLHFVVGGFAYLLPKTAVVLRCPARRVRKP

SEQ ID NO: 26640 - protein, 34 aa, Artificial Sequence
  Quasi-synthetic sequence derived from human genome
WRRRHCCFAKMTWNAKRSLFRTHLIGVLSLVFLF

SEQ ID NO: 26641 - protein, 34 aa, Artificial Sequence
  Quasi-synthetic sequence derived from human genome
LNNEVVKMRKEVKRIRVLVIRKLVRSVGRLKSKK

SEQ ID NO: 26642 - protein, 34 aa, Artificial Sequence
  Quasi-synthetic sequence derived from human genome
RKNYGLMRLGFLRLQALHRSRKLHQQYRLARQRI

SEQ ID NO: 26643 - protein, 34 aa, Artificial Sequence
  Quasi-synthetic sequence derived from human genome
FILILGNNKLRHASLKVIWKVMSILKGRKFQQHK

SEQ ID NO: 26644 - protein, 34 aa, Artificial Sequence
  Quasi-synthetic sequence derived from human genome
RRLGLALGLLLALVLAPRVLRAKPTVRKERVVRP

SEQ ID NO: 26645 - protein, 34 aa, Artificial Sequence
  Quasi-synthetic sequence derived from human genome
RSNLGWLCLLLLPIPLIVWVKRKEVQKTCRKHRK

SEQ ID NO: 26646 - protein, 34 aa, Artificial Sequence
  Quasi-synthetic sequence derived from human genome
PAWWFMSVKVKLKRKKRQKTPNRKLPRRGAPTLR

SEQ ID NO: 26647 - protein, 34 aa, Artificial Sequence
  Quasi-synthetic sequence derived from human genome
AWWFMSVKVKLKRKKRQKTPNRKLPRRGAPTLRP

SEQ ID NO: 26648 - protein, 34 aa, Artificial Sequence
  Quasi-synthetic sequence derived from human genome
YYRPRFFLLENVRNFVSFKRSMVLKLTLRCLVRM

SEQ ID NO: 26649 - protein, 34 aa, Artificial Sequence
  Quasi-synthetic sequence derived from human genome
DMGLWRMQVFAMARLRFLKLKRQTKVLLTLLLVF

SEQ ID NO: 26650 - protein, 34 aa, Artificial Sequence
  Quasi-synthetic sequence derived from human genome
FRLQKFLRRTQFLLFFLTAAYLMTGSLLLLQRVR

SEQ ID NO: 26651 - protein, 34 aa, Artificial Sequence
  Quasi-synthetic sequence derived from human genome
RYKIRHTKKKTFKCMKCSKSFFMLSHLIQHKRIH

SEQ ID NO: 26652 - protein, 34 aa, Artificial Sequence
  Quasi-synthetic sequence derived from human genome
LKVIQQNVHKFLQLRFWGWWKLYNKVKPLLNVAR

SEQ ID NO: 26653 - protein, 34 aa, Artificial Sequence
  Quasi-synthetic sequence derived from human genome
LKMVWISKASAIQRKGRAGRCRPGICFRLFSRLR

SEQ ID NO: 26654 - protein, 34 aa, Artificial Sequence
  Quasi-synthetic sequence derived from human genome
KFIIGYLFPLLTMSICYLCLIFKVKKRSILISSR

SEQ ID NO: 26655 - protein, 34 aa, Artificial Sequence
  Quasi-synthetic sequence derived from human genome
VVSRKKQKIIKMLLIVALLFILSWLPLWTLMMLS

SEQ ID NO: 26656 - protein, 34 aa, Artificial Sequence
  Quasi-synthetic sequence derived from human genome
KLRNIRYGFNTILVILIWRIFIARSQMARNIWYF

SEQ ID NO: 26657 - protein, 34 aa, Artificial Sequence
  Quasi-synthetic sequence derived from human genome
KKKFYGPQRRKMMFMGFIRLGVWYNFFRAWNGGF

SEQ ID NO: 26658 - protein, 34 aa, Artificial Sequence
  Quasi-synthetic sequence derived from human genome
VALWRQQICAIARVRLLKLKHERKALLALLLILM

SEQ ID NO: 26659 - protein, 34 aa, Artificial Sequence
  Quasi-synthetic sequence derived from human genome
LFSLYTRTLYLRYRPKVKFLFGIWPVILFEPLRK

SEQ ID NO: 26660 - protein, 34 aa, Artificial Sequence
  Quasi-synthetic sequence derived from human genome
FVIVVALGILSWTVICCCKRQKGKPKRKSKYKIL

SEQ ID NO: 26661 - protein, 34 aa, Artificial Sequence
  Quasi-synthetic sequence derived from human genome
LLAAGFVVYLKRKTLIRLLFTNKKTTIEKLRCVR

SEQ ID NO: 26662 - protein, 34 aa, Artificial Sequence
  Quasi-synthetic sequence derived from human genome
CTTVFTLLLLSIVILYCRIYSLVRTRSRRLTFRK

SEQ ID NO: 26663 - protein, 34 aa, Artificial Sequence
  Quasi-synthetic sequence derived from human genome
LSDIIQKYFFSPTLFRVIRLARIGRILRLIRGAK

SEQ ID NO: 26664 - protein, 34 aa, Artificial Sequence
  Quasi-synthetic sequence derived from human genome
IVYLALLIPYLHFLIFLFILRCLEMNCRKKLMRK

SEQ ID NO: 26665 - protein, 34 aa, Artificial Sequence
  Quasi-synthetic sequence derived from human genome
KSKIKSKYASYLSFIKILLKRGGVKVSTKNLIKL

SEQ ID NO: 26666 - protein, 34 aa, Artificial Sequence
  Quasi-synthetic sequence derived from human genome
WFRGCQVRAYIRHLNRIVTIIQKWWRSFLGRKQY

SEQ ID NO: 26667 - protein, 34 aa, Artificial Sequence
  Quasi-synthetic sequence derived from human genome
LRRNFMNIRPVKLKNLILLVKHWYRQVAAQNKGK

SEQ ID NO: 26668 - protein, 34 aa, Artificial Sequence
  Quasi-synthetic sequence derived from human genome
LLLPKGVVLKLKPVADRFPKKAWRQKRSSVLKPL

SEQ ID NO: 26669 - protein, 34 aa, Artificial Sequence
  Quasi-synthetic sequence derived from human genome
LLKIANFSNLIFLHLKRRVKSVILVMLLGPLLFL

SEQ ID NO: 26670 - protein, 34 aa, Artificial Sequence
  Quasi-synthetic sequence derived from human genome
LLKIANFSNFIFLHLKRRVKSVILVMLLGPLLFL

SEQ ID NO: 26671 - protein, 34 aa, Artificial Sequence
  Quasi-synthetic sequence derived from human genome
RLLATLLHNLISYMLLMKVNKNDIRKKVRRLMGK

SEQ ID NO: 26672 - protein, 34 aa, Artificial Sequence
  Quasi-synthetic sequence derived from human genome
VISKRGGKLCLLIRVANLRKSLLIGSHIYGKLLK

SEQ ID NO: 26673 - protein, 34 aa, Artificial Sequence
  Quasi-synthetic sequence derived from human genome
LILKVAVGTRLHRVPVKIKRMCVNGLCRARKHRH

SEQ ID NO: 26674 - protein, 34 aa, Artificial Sequence
  Quasi-synthetic sequence derived from human genome
YLAGYLGLSITWLLLGALLWMWWRRNRRGKLGRL

SEQ ID NO: 26675 - protein, 34 aa, Artificial Sequence
  Quasi-synthetic sequence derived from human genome
YLRRCSQLLAKIYKMPLKPIFLSGRLAGLPRRLQ

SEQ ID NO: 26676 - protein, 34 aa, Artificial Sequence
  Quasi-synthetic sequence derived from human genome
RKHAVAVIWAYWLGLKVRREYRKFFRANAGKKIY

SEQ ID NO: 26677 - protein, 34 aa, Artificial Sequence
  Quasi-synthetic sequence derived from human genome
FRARFRRLWPCGRRRRHRARRALRRVRPASSGPP

SEQ ID NO: 26678 - protein, 34 aa, Artificial Sequence
  Quasi-synthetic sequence derived from human genome
RLKILETLKLLMQHTWPRVSCRLVVLLKALLKLI

SEQ ID NO: 26679 - protein, 34 aa, Artificial Sequence
  Quasi-synthetic sequence derived from human genome
RLFKLKPPVWYLRSLVQNLLLIRRFKKTIIEHSP

SEQ ID NO: 26680 - protein, 34 aa, Artificial Sequence
  Quasi-synthetic sequence derived from human genome
CPRLWMWSWKHIRKHRQKVKQYKELYKKKLTSKK

SEQ ID NO: 26681 - protein, 34 aa, Artificial Sequence
  Quasi-synthetic sequence derived from human genome
SWRTRMRAFHLSLPGGAQLLTYLVKVLKRRTWRR

SEQ ID NO: 26682 - protein, 34 aa, Artificial Sequence
  Quasi-synthetic sequence derived from human genome
NKDLLRRVLVLMNSKHTFLALCALRFMRRIIGLK

SEQ ID NO: 26683 - protein, 34 aa, Artificial Sequence
  Quasi-synthetic sequence derived from human genome
LGRAFFGLKVALIFPVLVLLTVFIFVVRKKSHGK

SEQ ID NO: 26684 - protein, 34 aa, Artificial Sequence
  Quasi-synthetic sequence derived from human genome
LKKLLGKKLTRCLKPFENSRLRLWTKWVFAGVSL

SEQ ID NO: 26685 - protein, 34 aa, Artificial Sequence
  Quasi-synthetic sequence derived from human genome
IKQWRKNLWIFVSKFTEFDARKLHKLYKHAIKKR

SEQ ID NO: 26686 - protein, 34 aa, Artificial Sequence
  Quasi-synthetic sequence derived from human genome
MKRKKRVHFHGFMLDVHKRIHRLKQSLPKRKPGF

SEQ ID NO: 26687 - protein, 34 aa, Artificial Sequence
  Quasi-synthetic sequence derived from human genome
LLKIANFSNLIFLHLKRRVKSVVLVILLGPLLFL

SEQ ID NO: 26688 - protein, 34 aa, Artificial Sequence
  Quasi-synthetic sequence derived from human genome
KLFRHYYVLIVCYIYFTRIIAFLLKLAVPFQWKW

SEQ ID NO: 26689 - protein, 34 aa, Artificial Sequence
  Quasi-synthetic sequence derived from human genome
YRRRCCRLCIWLLQTLVHLLQLGQVWRYLRALYL

SEQ ID NO: 26690 - protein, 34 aa, Artificial Sequence
  Quasi-synthetic sequence derived from human genome
KKRNSTLYITMLLIVPVIVAGAIIVLLLYLKRLK

SEQ ID NO: 26691 - protein, 34 aa, Artificial Sequence
  Quasi-synthetic sequence derived from human genome
VYRRRFVQQKRAAITLQHYFRTWQTRKQFLLYRK

SEQ ID NO: 26692 - protein, 34 aa, Artificial Sequence
  Quasi-synthetic sequence derived from human genome
SALTFVCLILLIAVLVYWRGCNKIKSKGFPRRFR

SEQ ID NO: 26693 - protein, 34 aa, Artificial Sequence
  Quasi-synthetic sequence derived from human genome
LWLVLVAVGAGLLLLGLIILLLWKCGFFKRARTR

SEQ ID NO: 26694 - protein, 34 aa, Artificial Sequence
  Quasi-synthetic sequence derived from human genome
FIIGLWWCTKSILKYICKKQKRTCYLGSKTLFYR

SEQ ID NO: 26695 - protein, 34 aa, Artificial Sequence
  Quasi-synthetic sequence derived from human genome
VRSKKIFLSKLIVCFLSTWLPFVLLQVIIVLLKV

SEQ ID NO: 26696 - protein, 34 aa, Artificial Sequence
  Quasi-synthetic sequence derived from human genome
VKRAAVQFLNNAWGIQKKQNAKRFKRRWMVRKMK

SEQ ID NO: 26697 - protein, 34 aa, Artificial Sequence
  Quasi-synthetic sequence derived from human genome
SLVIRNLQRVIPIRRAPLRSKIEIVRRILGVQKF

SEQ ID NO: 26698 - protein, 34 aa, Artificial Sequence
  Quasi-synthetic sequence derived from human genome
RRKSLPSVTRPRLRVKMYNFLRSLPTLHERFRLL

SEQ ID NO: 26699 - protein, 34 aa, Artificial Sequence
  Quasi-synthetic sequence derived from human genome
LLRRLKLVKMYRSKNDLSQLQLLIKKWRSCSQLL

SEQ ID NO: 26700 - protein, 34 aa, Artificial Sequence
  Quasi-synthetic sequence derived from human genome
RKKLKKFTTLEIVLSVLLLVLFIISIVLIVLLAK

SEQ ID NO: 26701 - protein, 34 aa, Artificial Sequence
  Quasi-synthetic sequence derived from human genome
RLRSPALARRLLLAVWLAALLLAVPAAVYRHLWR

SEQ ID NO: 26702 - protein, 34 aa, Artificial Sequence
  Quasi-synthetic sequence derived from human genome
MRLTRKRLCSFLIALYCLFSLYAAYHVFFGRRRQ

SEQ ID NO: 26703 - protein, 34 aa, Artificial Sequence
  Quasi-synthetic sequence derived from human genome
KNVTLKRRSPWVLAFEIFIPLVLFFILLGLRQKK

SEQ ID NO: 26704 - protein, 34 aa, Artificial Sequence
  Quasi-synthetic sequence derived from human genome
KKNLKALYVVHPTSFIKVLWNILKPLISHKFGKK

SEQ ID NO: 26705 - protein, 34 aa, Artificial Sequence
  Quasi-synthetic sequence derived from human genome
RRANARCFWNARLARAASRLAFQGWLRRGVLLVR

SEQ ID NO: 26706 - protein, 34 aa, Artificial Sequence
  Quasi-synthetic sequence derived from human genome
RILFLKPSCMLEVITWPIQAFVKRKVIIFLKKCL

SEQ ID NO: 26707 - protein, 34 aa, Artificial Sequence
  Quasi-synthetic sequence derived from human genome
LLLKKLKAWNDIKKVYASQRMRAGKGKMRNRRRI

SEQ ID NO: 26708 - protein, 34 aa, Artificial Sequence
  Quasi-synthetic sequence derived from human genome
GLLVFFFLIVPLIVCAIFIFIKRDQLWRSYFRKK

SEQ ID NO: 26709 - protein, 34 aa, Artificial Sequence
  Quasi-synthetic sequence derived from human genome
IRRRSKFANLGRIFKPWKWRKKKSEKFKHTSAAL

SEQ ID NO: 26710 - protein, 34 aa, Artificial Sequence
  Quasi-synthetic sequence derived from human genome
PLGRRFRSLKMWFVFRMYGVKGLQAYIRKHVQLS

SEQ ID NO: 26711 - protein, 34 aa, Artificial Sequence
  Quasi-synthetic sequence derived from human genome
LTRRLLFKDRHFTCSKIIGRRFACFAQRLSHRRK

SEQ ID NO: 26712 - protein, 34 aa, Artificial Sequence
  Quasi-synthetic sequence derived from human genome
KPGQLINWFICSLCVPRVRKLWSSRRPRTRRNLL

SEQ ID NO: 26713 - protein, 34 aa, Artificial Sequence
  Quasi-synthetic sequence derived from human genome
VRFQTPGRFSWFCKRRRAFWHTPRLPTLPKRVPR

SEQ ID NO: 26714 - protein, 34 aa, Artificial Sequence
  Quasi-synthetic sequence derived from human genome
FVAGLLLGKGCRYFRYILKQDHQILGKKIKRMKR

SEQ ID NO: 26715 - protein, 34 aa, Artificial Sequence
  Quasi-synthetic sequence derived from human genome
IARHLHAVIRYSVAIILFTILPFFLLHRWCSKKK

SEQ ID NO: 26716 - protein, 34 aa, Artificial Sequence
  Quasi-synthetic sequence derived from human genome
LWKRLIKLKDNHCEQLRVKIRKLKNKASVLQKRI

SEQ ID NO: 26717 - protein, 34 aa, Artificial Sequence
  Quasi-synthetic sequence derived from human genome
FWLQWFNSFVNPLLYPLCHKRFQKAFLKIFCIKK

SEQ ID NO: 26718 - protein, 34 aa, Artificial Sequence
  Quasi-synthetic sequence derived from human genome
LKNLRKQYRNVKKMTAKELVKVLFSFFWMLFVGL

SEQ ID NO: 26719 - protein, 34 aa, Artificial Sequence
  Quasi-synthetic sequence derived from human genome
QLRGARVITPEDLLFLMRKDKKKLRRLLKYMFIR

SEQ ID NO: 26720 - protein, 34 aa, Artificial Sequence
  Quasi-synthetic sequence derived from human genome
LLLLLLLLFLILRHRRQGKHWTSSPAQLPTPRKK

SEQ ID NO: 26721 - protein, 34 aa, Artificial Sequence
  Quasi-synthetic sequence derived from human genome
VGILVGCLCLLLAVYFIARKIRKKRLENRKSVVF

SEQ ID NO: 26722 - protein, 34 aa, Artificial Sequence
  Quasi-synthetic sequence derived from human genome
AITQFRLFKFCTCLATVFSFLKRLICRSGRGRKL

SEQ ID NO: 26723 - protein, 34 aa, Artificial Sequence
  Quasi-synthetic sequence derived from human genome
RMWRIRRRYCQVLNAVRIIQAYWRCRSCASRGFI

SEQ ID NO: 26724 - protein, 34 aa, Artificial Sequence
  Quasi-synthetic sequence derived from human genome
KCFKKGLKGKGFVLLVKLACIVVASFVLCWLPFF

SEQ ID NO: 26725 - protein, 34 aa, Artificial Sequence
  Quasi-synthetic sequence derived from human genome
WLLVLLLHKHRSILLRRLCSLMGTVFLLRCFTMF

SEQ ID NO: 26726 - protein, 34 aa, Artificial Sequence
  Quasi-synthetic sequence derived from human genome
WLARTHYKRSMHAIIYLQCCFRRMMAKRELKKLK

SEQ ID NO: 26727 - protein, 34 aa, Artificial Sequence
  Quasi-synthetic sequence derived from human genome
RFKKGKIVLLFSLLCWVLFNLGIGFVKPATLRCV

SEQ ID NO: 26728 - protein, 34 aa, Artificial Sequence
  Quasi-synthetic sequence derived from human genome
MRMGKKKRAMKGKKPSFMVIRFPGRRGYGRLRPR

SEQ ID NO: 26729 - protein, 34 aa, Artificial Sequence
  Quasi-synthetic sequence derived from human genome
MWRRYRAKKYLCKVKAACKIQAWYRCWRAHKEYL

SEQ ID NO: 26730 - protein, 34 aa, Artificial Sequence
  Quasi-synthetic sequence derived from human genome
FKFNIAVGLILCISLVILTFQWRFYLSFRKLMRW

SEQ ID NO: 26731 - protein, 34 aa, Artificial Sequence
  Quasi-synthetic sequence derived from human genome
VLKTLTKPVTLSRSKINKTKVLKMIFVHLIIFCF

SEQ ID NO: 26732 - protein, 34 aa, Artificial Sequence
  Quasi-synthetic sequence derived from human genome
VIISIMSSFAIFVLLTITTLYCCRRRKQWKNKKR

SEQ ID NO: 26733 - protein, 34 aa, Artificial Sequence
  Quasi-synthetic sequence derived from human genome
LRRRLVPRYRLQLLGIACMVICTRFISKEILTIR

SEQ ID NO: 26734 - protein, 34 aa, Artificial Sequence
  Quasi-synthetic sequence derived from human genome
LVPVMKKLVPVRRRAWGQLCLPPQRLRVTRHPLI

SEQ ID NO: 26735 - protein, 34 aa, Artificial Sequence
  Quasi-synthetic sequence derived from human genome
HLQQGNMHKNMRVLSRTSKFRRLRQLLRRRKKRR

SEQ ID NO: 26736 - protein, 34 aa, Artificial Sequence
  Quasi-synthetic sequence derived from human genome
LRWRRPALHRPIKVNLLIPVAYLVFWAFLLVFSF

SEQ ID NO: 26737 - protein, 34 aa, Artificial Sequence
  Quasi-synthetic sequence derived from human genome
LKKHTLIRFLPRPIRQQLLYKRRYIFSVVENLQR

SEQ ID NO: 26738 - protein, 34 aa, Artificial Sequence
  Quasi-synthetic sequence derived from human genome
LGRVAQVLRLMRIFRILKLARHSTGLRSLGATLK

SEQ ID NO: 26739 - protein, 34 aa, Artificial Sequence
  Quasi-synthetic sequence derived from human genome
VVCSGWLRKSPPEKKLKRYAWKRRWFVLRSGRLT

SEQ ID NO: 26740 - protein, 34 aa, Artificial Sequence
  Quasi-synthetic sequence derived from human genome
KRFAVKPKRDRHIMLTFSLRPFGCGICNKRFKLK

SEQ ID NO: 26741 - protein, 34 aa, Artificial Sequence
  Quasi-synthetic sequence derived from human genome
RVKFLNYLSRNFYTLRFLALFLAFAINFILLFYK

SEQ ID NO: 26742 - protein, 34 aa, Artificial Sequence
  Quasi-synthetic sequence derived from human genome
LRASSNRNFLLTMRPFLKRAILVLSYVLVILYFR

SEQ ID NO: 26743 - protein, 34 aa, Artificial Sequence
  Quasi-synthetic sequence derived from human genome
PMWVLALIVIFLTIAVLLALRFCGIYGYRLRRKW

SEQ ID NO: 26744 - protein, 34 aa, Artificial Sequence
  Quasi-synthetic sequence derived from human genome
FKNLFYRTYMLFKNASGKRRFLLCLLLFTVITYF

SEQ ID NO: 26745 - protein, 34 aa, Artificial Sequence
  Quasi-synthetic sequence derived from human genome
IIVLAILLFLAAMLFVLMNWYYRTVHKRKLKAIV

SEQ ID NO: 26746 - protein, 34 aa, Artificial Sequence
  Quasi-synthetic sequence derived from human genome
VIAGLVVIFMMLGGTFLYWRGRRIQNKRAMRRYL

SEQ ID NO: 26747 - protein, 34 aa, Artificial Sequence
  Quasi-synthetic sequence derived from human genome
CKKLNKKRLKKRKGYQGAMVEKKILMKVHSRFIV

SEQ ID NO: 26748 - protein, 34 aa, Artificial Sequence
  Quasi-synthetic sequence derived from human genome
LFKILASFYISLVIFYGLICMYTLWWMLRRSLKK

SEQ ID NO: 26749 - protein, 34 aa, Artificial Sequence
  Quasi-synthetic sequence derived from human genome
IFITMFATFFFFKLLIKVFLALLTHFYIVKGNRK

SEQ ID NO: 26750 - protein, 34 aa, Artificial Sequence
  Quasi-synthetic sequence derived from human genome
RRWGQAISKSKLSRRWRRWNRFNRRRCRAAVKSV

SEQ ID NO: 26751 - protein, 34 aa, Artificial Sequence
  Quasi-synthetic sequence derived from human genome
KRQLFFRKKLLHSSQMLRAVSLGQDRYRRRYWVL

SEQ ID NO: 26752 - protein, 34 aa, Artificial Sequence
  Quasi-synthetic sequence derived from human genome
KLFKSLLGKKKMRILILSLDTAGKTTILYKLKLG

SEQ ID NO: 26753 - protein, 34 aa, Artificial Sequence
  Quasi-synthetic sequence derived from human genome
PRQKALYRRLATVHMSRMINKYKRRRFQKTKNLL

SEQ ID NO: 26754 - protein, 34 aa, Artificial Sequence
  Quasi-synthetic sequence derived from human genome
LKKINFHKITLRLWNTKDKMSRKVRYYRLKTAGF

SEQ ID NO: 26755 - protein, 34 aa, Artificial Sequence
  Quasi-synthetic sequence derived from human genome
KASQCGKYLKVFYKFINLNRYKIRHTRKKPFKCK

SEQ ID NO: 26756 - protein, 34 aa, Artificial Sequence
  Quasi-synthetic sequence derived from human genome
CRRQIIRALCLLLLLLHAGSAKNIWKRALPARLA

SEQ ID NO: 26757 - protein, 34 aa, Artificial Sequence
  Quasi-synthetic sequence derived from human genome
WKVAHLKEHRRVFQAMWLSFLKHKLPLSLYKKVL

SEQ ID NO: 26758 - protein, 34 aa, Artificial Sequence
  Quasi-synthetic sequence derived from human genome
YWLSLLFKKLVGTKVLMASVQGSKRRKLRVYLHC

SEQ ID NO: 26759 - protein, 34 aa, Artificial Sequence
  Quasi-synthetic sequence derived from human genome
VNVVLVMAYGSLVFVLLFIFVKRQIMRFAMKSRR

SEQ ID NO: 26760 - protein, 34 aa, Artificial Sequence
  Quasi-synthetic sequence derived from human genome
RYFRIQEVLKHARHFRGRKNRCYRLAVRTVIRAF

SEQ ID NO: 26761 - protein, 34 aa, Artificial Sequence
  Quasi-synthetic sequence derived from human genome
RIKIFFALAPVFSTKYLKSPLIRMTYKWKSIVMA

SEQ ID NO: 26762 - protein, 34 aa, Artificial Sequence
  Quasi-synthetic sequence derived from human genome
KGLCLFKKHFMALIFSAKRLKIIPFICMYFPLSH

SEQ ID NO: 26763 - protein, 34 aa, Artificial Sequence
  Quasi-synthetic sequence derived from human genome
LRRGVLLVRAPPACLQVLRDAWRRRALRPPRGFR

SEQ ID NO: 26764 - protein, 34 aa, Artificial Sequence
  Quasi-synthetic sequence derived from human genome
VILCRFRKLHCTRNFIHMNLFVSFMLRAISVFIK

SEQ ID NO: 26765 - protein, 34 aa, Artificial Sequence
  Quasi-synthetic sequence derived from human genome
KKKWKKTCCLPSFVIFLFIIGCIISGITLLAIFR

SEQ ID NO: 26766 - protein, 34 aa, Artificial Sequence
  Quasi-synthetic sequence derived from human genome
KSKYASYLSFIKILLKRGGVRVSTKNLIKLFQII

SEQ ID NO: 26767 - protein, 34 aa, Artificial Sequence
  Quasi-synthetic sequence derived from human genome
IKLVVTFKSGKFIRIFQLSNNIRSVVLRHCKKRQ

SEQ ID NO: 26768 - protein, 34 aa, Artificial Sequence
  Quasi-synthetic sequence derived from human genome
LPRKKLKHIRQGTNKGLIKKKLKNMLAAVVTKKK

SEQ ID NO: 26769 - protein, 34 aa, Artificial Sequence
  Quasi-synthetic sequence derived from human genome
FFRLFRVMRLVKLLSRGEGIRTLLWTFIKSFQAL

SEQ ID NO: 26770 - protein, 34 aa, Artificial Sequence
  Quasi-synthetic sequence derived from human genome
LRAAKWLHFPQLALRRRLGQLSCMSRPALKLRSW

SEQ ID NO: 26771 - protein, 34 aa, Artificial Sequence
  Quasi-synthetic sequence derived from human genome
LRKSLKPLLEKRRRARINQSLSQLKGLILPLLGR

SEQ ID NO: 26772 - protein, 34 aa, Artificial Sequence
  Quasi-synthetic sequence derived from human genome
RRKSNPKPLVLSEARKQLMIYRLPQVLRLHLKRF

SEQ ID NO: 26773 - protein, 34 aa, Artificial Sequence
  Quasi-synthetic sequence derived from human genome
KKRVRFTKRKQKVPGFPKRFTVKPVVLGFPYFHS

SEQ ID NO: 26774 - protein, 34 aa, Artificial Sequence
  Quasi-synthetic sequence derived from human genome
ILDPWVYILFRRAVLRRLQPRLSTRPRRSLTLWP

SEQ ID NO: 26775 - protein, 34 aa, Artificial Sequence
  Quasi-synthetic sequence derived from human genome
RYRKEFLRQRRAAVTLQAWWRGYCNRRNFKLILV

SEQ ID NO: 26776 - protein, 34 aa, Artificial Sequence
  Quasi-synthetic sequence derived from human genome
HRMWGRLVGLVYILPAAYFWRKGWLSRGMKGRVL

SEQ ID NO: 26777 - protein, 34 aa, Artificial Sequence
  Quasi-synthetic sequence derived from human genome
ALRYNILTLMRMLSLKSLKKQMKKVKKMTVKDMV

SEQ ID NO: 26778 - protein, 34 aa, Artificial Sequence
  Quasi-synthetic sequence derived from human genome
VVCTGWLRKSPPEKKLRRYAWKKRWFILRSGRMS

SEQ ID NO: 26779 - protein, 34 aa, Artificial Sequence
  Quasi-synthetic sequence derived from human genome
KAVRHFLLRKKQEKFTSGIIKIQALWRGYSWRKK

SEQ ID NO: 26780 - protein, 34 aa, Artificial Sequence
  Quasi-synthetic sequence derived from human genome
RLRTVLKNLSLLKLLKSSNRRIQELHKLAKRCWH

SEQ ID NO: 26781 - protein, 34 aa, Artificial Sequence
  Quasi-synthetic sequence derived from human genome
HLPWMIVLFLLLVLVVIVVCSIRKSSRTLKKGPR

SEQ ID NO: 26782 - protein, 34 aa, Artificial Sequence
  Quasi-synthetic sequence derived from human genome
IKLLSLIKWKGSKSSKLNSKFWKHLVYEMPIKKK

SEQ ID NO: 26783 - protein, 34 aa, Artificial Sequence
  Quasi-synthetic sequence derived from human genome
RKLLALGTWLLALLLTLPVMLAMRLVRRGPKSLC

SEQ ID NO: 26784 - protein, 34 aa, Artificial Sequence
  Quasi-synthetic sequence derived from human genome
VVVKILKPVKKKKIKREVKILENLRGGTNIIKLI

SEQ ID NO: 26785 - protein, 34 aa, Artificial Sequence
  Quasi-synthetic sequence derived from human genome
RWLNKLMKLLQRLPNSVVRRLHRERYKKPSWLTP

SEQ ID NO: 26786 - protein, 34 aa, Artificial Sequence
  Quasi-synthetic sequence derived from human genome
RSYILNKDLLRKALILMNSKHTHLILCVLRFMRR

SEQ ID NO: 26787 - protein, 34 aa, Artificial Sequence
  Quasi-synthetic sequence derived from human genome
RRRMALRPGSRRPTAFFFHSRWLVPNLLAFFLGL

SEQ ID NO: 26788 - protein, 34 aa, Artificial Sequence
  Quasi-synthetic sequence derived from human genome
SRWWTLSTTLWALSLLLGVARSLWMLLKLRQRLR

SEQ ID NO: 26789 - protein, 34 aa, Artificial Sequence
  Quasi-synthetic sequence derived from human genome
RVRYWDLLLLIPNVLFLIFLLWKLPSARAKIRIT

SEQ ID NO: 26790 - protein, 34 aa, Artificial Sequence
  Quasi-synthetic sequence derived from human genome
NPILYNLISKKYRAAAFKLLLARKSRPRGFHRSR

SEQ ID NO: 26791 - protein, 34 aa, Artificial Sequence
  Quasi-synthetic sequence derived from human genome
KLRKVWKISLQGPCYMTLLMIAFGLLWGHLLRIK

SEQ ID NO: 26792 - protein, 34 aa, Artificial Sequence
  Quasi-synthetic sequence derived from human genome
LRVLRLLRTLRPLRVISRAPGLKLVVETLISSLK

SEQ ID NO: 26793 - protein, 34 aa, Artificial Sequence
  Quasi-synthetic sequence derived from human genome
RTLARCPHCRKVSSIGRRYPRKRCICCFLLGLLL

SEQ ID NO: 26794 - protein, 34 aa, Artificial Sequence
  Quasi-synthetic sequence derived from human genome
AQQNMSLAILRIIRLVRVFRIFKLSRHSKGLQIL

SEQ ID NO: 26795 - protein, 34 aa, Artificial Sequence
  Quasi-synthetic sequence derived from human genome
CLRACKKGFIQRISKGGLIKTKRKRKKQRVKIAY

SEQ ID NO: 26796 - protein, 34 aa, Artificial Sequence
  Quasi-synthetic sequence derived from human genome
KWFVKAGGVAMYAVSWCFMFSIWRFAWRKSIKKY

SEQ ID NO: 26797 - protein, 34 aa, Artificial Sequence
  Quasi-synthetic sequence derived from human genome
RSLKPMQTRVVGRLQKPCFFFHWLKLFAIPILLI

SEQ ID NO: 26798 - protein, 34 aa, Artificial Sequence
  Quasi-synthetic sequence derived from human genome
WFLALSSMVCVPLFVVITLLKTRGPFRKRLRQLI

SEQ ID NO: 26799 - protein, 34 aa, Artificial Sequence
  Quasi-synthetic sequence derived from human genome
FLQRLLLVHGRWSYVRICKFLRYFFYKSMASMMV

SEQ ID NO: 26800 - protein, 34 aa, Artificial Sequence
  Quasi-synthetic sequence derived from human genome
LRIFRIPRRPRKLTLKGYRQHWVVFKETTLSYYK

SEQ ID NO: 26801 - protein, 34 aa, Artificial Sequence
  Quasi-synthetic sequence derived from human genome
LMRRILTRNEKNRPRRRFLCHLSRQQLRMAMRIP

SEQ ID NO: 26802 - protein, 34 aa, Artificial Sequence
  Quasi-synthetic sequence derived from human genome
LRGLKRKWIRCSAQATVLHLKKFIAKKLNLSSFN

SEQ ID NO: 26803 - protein, 34 aa, Artificial Sequence
  Quasi-synthetic sequence derived from human genome
WKKHRQIVKPGFNISILKIFITMMSKSVRMMLNK

SEQ ID NO: 26804 - protein, 34 aa, Artificial Sequence
  Quasi-synthetic sequence derived from human genome
YTIYSTFGAFYIPLLLMLVLYGRIFRAARFRIRK

SEQ ID NO: 26805 - protein, 34 aa, Artificial Sequence
  Quasi-synthetic sequence derived from human genome
LVLLVILVTVLQRRRPAWLPVRLRSWAWLPVWLH

SEQ ID NO: 26806 - protein, 34 aa, Artificial Sequence
  Quasi-synthetic sequence derived from human genome
WIWWRMLRQVLRRGLQSFCHRLGLCVSRHPVFFL

SEQ ID NO: 26807 - protein, 34 aa, Artificial Sequence
  Quasi-synthetic sequence derived from human genome
IFPKQKYLSKKTTKRKRGYIKNKLVFKKGKKISK

SEQ ID NO: 26808 - protein, 34 aa, Artificial Sequence
  Quasi-synthetic sequence derived from human genome
KKCILRWLARQKTCPCCRKEVKRKKVVHMNKLRK

SEQ ID NO: 26809 - protein, 34 aa, Artificial Sequence
  Quasi-synthetic sequence derived from human genome
MRRFLSKVYSFPMRKLILFLVFPVVRQTPTQHFK

SEQ ID NO: 26810 - protein, 34 aa, Artificial Sequence
  Quasi-synthetic sequence derived from human genome
KRKHFRLVLRLVLRGGRELGTFHSRLIKVISKPS

SEQ ID NO: 26811 - protein, 34 aa, Artificial Sequence
  Quasi-synthetic sequence derived from human genome
LLRVFVEGWTHLVRLLRLIILIRIFHLLHQKRQL

SEQ ID NO: 26812 - protein, 34 aa, Artificial Sequence
  Quasi-synthetic sequence derived from human genome
RFKVMKAKKMRNRIIKNEVKKLQKAALLKASPKK

SEQ ID NO: 26813 - protein, 34 aa, Artificial Sequence
  Quasi-synthetic sequence derived from human genome
RRRTRFVFQKALRSLRRYPLPLRSGKEAKILQHF

SEQ ID NO: 26814 - protein, 34 aa, Artificial Sequence
  Quasi-synthetic sequence derived from human genome
RLQQGNMCKNMRVLSRTSKFRRLRELLRRRKKRR

SEQ ID NO: 26815 - protein, 34 aa, Artificial Sequence
  Quasi-synthetic sequence derived from human genome
KKRTSLHPSYKGLMRLLHCKTLHIVLFTLLYKIL

SEQ ID NO: 26816 - protein, 34 aa, Artificial Sequence
  Quasi-synthetic sequence derived from human genome
RCQFANGIFQLWFHFKRYRYRRPGPCWRPIRHCR

SEQ ID NO: 26817 - protein, 34 aa, Artificial Sequence
  Quasi-synthetic sequence derived from human genome
GARRRQRGRLMRRLVRRLRRWGLLPRTNTPARAS

SEQ ID NO: 26818 - protein, 34 aa, Artificial Sequence
  Quasi-synthetic sequence derived from human genome
IDSEVYKTARALRIVRFTKILSLLRLLRLSRLIR

SEQ ID NO: 26819 - protein, 34 aa, Artificial Sequence
  Quasi-synthetic sequence derived from human genome
MLWKLLLRSQSCRLCSFRKMRSPPKYRPFLACFT

SEQ ID NO: 26820 - protein, 34 aa, Artificial Sequence
  Quasi-synthetic sequence derived from human genome
MRARRGLLRLPRRSLLAALFFFSLSSSLLYFVYV

SEQ ID NO: 26821 - protein, 34 aa, Artificial Sequence
  Quasi-synthetic sequence derived from human genome
LRHLHILIGTSVVKIPFTILLFFLLHRWCSNKKK

SEQ ID NO: 26822 - protein, 34 aa, Artificial Sequence
  Quasi-synthetic sequence derived from human genome
RRLRRAARRQVLSGHLPFCRFRLRYPSLSPSAFW

SEQ ID NO: 26823 - protein, 34 aa, Artificial Sequence
  Quasi-synthetic sequence derived from human genome
RIVRALFEIALRKRWPTMTYRLLNLSKVIDKRLW

SEQ ID NO: 26824 - protein, 34 aa, Artificial Sequence
  Quasi-synthetic sequence derived from human genome
RASRRRARVVHMLVMVALFFTLSWLPLWALLLLI

SEQ ID NO: 26825 - protein, 34 aa, Artificial Sequence
  Quasi-synthetic sequence derived from human genome
CKRKQLLKPVFLNSWIDLRATYKLFYRRKPKGLS

SEQ ID NO: 26826 - protein, 34 aa, Artificial Sequence
  Quasi-synthetic sequence derived from human genome
LLAILLVVAVFCILWNWNKRKKRQVPYLRVTVMP

SEQ ID NO: 26827 - protein, 34 aa, Artificial Sequence
  Quasi-synthetic sequence derived from human genome
FIQKRKFQEIKNSTIKIQAMWRRYRAKKYLCKVK

SEQ ID NO: 26828 - protein, 34 aa, Artificial Sequence
  Quasi-synthetic sequence derived from human genome
RYRLIREFHSRPALAPPFIVISHLRLLLRQLCRR

SEQ ID NO: 26829 - protein, 34 aa, Artificial Sequence
  Quasi-synthetic sequence derived from human genome
YKSRFLCGKEIKKKKCIFRLRIRVPPNPPGKLLP

SEQ ID NO: 26830 - protein, 34 aa, Artificial Sequence
  Quasi-synthetic sequence derived from human genome
YLVSGIRTPPVRRNSKLATLGRIFKPWKWRKKKN

SEQ ID NO: 26831 - protein, 34 aa, Artificial Sequence
  Quasi-synthetic sequence derived from human genome
RLLRYLIHLRFQSSKSGKIYLHRDVRLLFSRKSM

SEQ ID NO: 26832 - protein, 34 aa, Artificial Sequence
  Quasi-synthetic sequence derived from human genome
RYWAISRPFRYKRKMTQRMALVMVGLAWTLSILI

SEQ ID NO: 26833 - protein, 34 aa, Artificial Sequence
  Quasi-synthetic sequence derived from human genome
RCKKRMFKFHQMKHIFEILDKMRCLRKRSTVSFL

SEQ ID NO: 26834 - protein, 34 aa, Artificial Sequence
  Quasi-synthetic sequence derived from human genome
PRRRMPGIGWLKKCYQMIDRRLRKNLKSLIIVHP

SEQ ID NO: 26835 - protein, 34 aa, Artificial Sequence
  Quasi-synthetic sequence derived from human genome
KYIEFKKSTVILQALVRGWLVRKRFLEQRAKIRL

SEQ ID NO: 26836 - protein, 34 aa, Artificial Sequence
  Quasi-synthetic sequence derived from human genome
HWRGRYGRRRPFIWALSLGILLSLFLIPRAGWLA

SEQ ID NO: 26837 - protein, 34 aa, Artificial Sequence
  Quasi-synthetic sequence derived from human genome
RQRRQKLLLAQLHHRKRVKAAGQIQAWWRGVLVR

SEQ ID NO: 26838 - protein, 34 aa, Artificial Sequence
  Quasi-synthetic sequence derived from human genome
YRKVKLLNQVRLLRVQLCHMKNMFKTCRLAKELL

SEQ ID NO: 26839 - protein, 34 aa, Artificial Sequence
  Quasi-synthetic sequence derived from human genome
LARGCARRARGRWEGSAPRRLLLALHRRLRGLRR

SEQ ID NO: 26840 - protein, 34 aa, Artificial Sequence
  Quasi-synthetic sequence derived from human genome
LSLSLAGALFLLAGLVAVALVVRKVKLRNLQKKR

SEQ ID NO: 26841 - protein, 34 aa, Artificial Sequence
  Quasi-synthetic sequence derived from human genome
VKVMLKSIKTRLGRRVPAAPPALRRNLLLQAWKC

SEQ ID NO: 26842 - protein, 34 aa, Artificial Sequence
  Quasi-synthetic sequence derived from human genome
KCALVRHKFNRLPRVLILHLKRYSFNVALSLNNK

SEQ ID NO: 26843 - protein, 34 aa, Artificial Sequence
  Quasi-synthetic sequence derived from human genome
FKKFYFHQHLCILKAKLGRPVTWNRQLRHFQGRK

SEQ ID NO: 26844 - protein, 34 aa, Artificial Sequence
  Quasi-synthetic sequence derived from human genome
GIAGALFILGALYSIKVMNRRRRNGFKRHKRKQR

SEQ ID NO: 26845 - protein, 34 aa, Artificial Sequence
  Quasi-synthetic sequence derived from human genome
KACLPPSLRDLIQGLSFVTRRRIRRTVRRALRRV

SEQ ID NO: 26846 - protein, 34 aa, Artificial Sequence
  Quasi-synthetic sequence derived from human genome
RMVWRLLHGQVLTRRERRRLLRTCVDFFRLVPFM

SEQ ID NO: 26847 - protein, 34 aa, Artificial Sequence
  Quasi-synthetic sequence derived from human genome
LLRKYRRELQLRKKCHNELVRLKGNIRVIARVRP

SEQ ID NO: 26848 - protein, 34 aa, Artificial Sequence
  Quasi-synthetic sequence derived from human genome
AWASRWLRRKLRARRKGGAPVHVRHMYSTRRPLR

SEQ ID NO: 26849 - protein, 34 aa, Artificial Sequence
  Quasi-synthetic sequence derived from human genome
YVFFGLVLALIGLIFLMVLYLNRRGIQRWMRNLR

SEQ ID NO: 26850 - protein, 34 aa, Artificial Sequence
  Quasi-synthetic sequence derived from human genome
LVPYRCFKRRFPGISRSTYYNWRRKALRRNPSFK

SEQ ID NO: 26851 - protein, 34 aa, Artificial Sequence
  Quasi-synthetic sequence derived from human genome
RRFQGLLLDRRGRLHGQVLRLREVARRLERLRRR

SEQ ID NO: 26852 - protein, 34 aa, Artificial Sequence
  Quasi-synthetic sequence derived from human genome
KVKRFRMHVEQKDIIYRVYLKQIIVKVILFVLII

SEQ ID NO: 26853 - protein, 34 aa, Artificial Sequence
  Quasi-synthetic sequence derived from human genome
LRTLRAVRVLRPLKLVSGIPSLQIVLKSIMKAMV

SEQ ID NO: 26854 - protein, 34 aa, Artificial Sequence
  Quasi-synthetic sequence derived from human genome
LRTLRAVRVLRPLKLVSGIPSLQVVLKSIMKAMI

SEQ ID NO: 26855 - protein, 34 aa, Artificial Sequence
  Quasi-synthetic sequence derived from human genome
RLAYIAHPKLGKRARARIAKGLRLCRPKAKAKAK

SEQ ID NO: 26856 - protein, 34 aa, Artificial Sequence
  Quasi-synthetic sequence derived from human genome
KLFWIRVKYHVKDQKTILDKKKLIAFWLERYAKR

SEQ ID NO: 26857 - protein, 34 aa, Artificial Sequence
  Quasi-synthetic sequence derived from human genome
VATRFTLPRFLQRRSSRRKVCTKTFLGPRIIGLR

SEQ ID NO: 26858 - protein, 34 aa, Artificial Sequence
  Quasi-synthetic sequence derived from human genome
KVFLKVDKCITKTRSMMALLVQLLSLCYKLLKKL

SEQ ID NO: 26859 - protein, 34 aa, Artificial Sequence
  Quasi-synthetic sequence derived from human genome
RRFRLSSHFIRHRRAHMRRRLYICAGCGRDFKLP

SEQ ID NO: 26860 - protein, 34 aa, Artificial Sequence
  Quasi-synthetic sequence derived from human genome
FLLLFQYCLPLGFILVCYARIYRRLQRQGRVFHK

SEQ ID NO: 26861 - protein, 34 aa, Artificial Sequence
  Quasi-synthetic sequence derived from human genome
LWKMRLFQRQWANSFFQGLQQRMLQRSLRWWHLR

SEQ ID NO: 26862 - protein, 34 aa, Artificial Sequence
  Quasi-synthetic sequence derived from human genome
PKVMFTKVLKAQLWVYLRPVPRPATVYLQILRLK

SEQ ID NO: 26863 - protein, 34 aa, Artificial Sequence
  Quasi-synthetic sequence derived from human genome
FMQLQQRLLREKEAKIRKALDRLRKKRHLLRRQR

SEQ ID NO: 26864 - protein, 34 aa, Artificial Sequence
  Quasi-synthetic sequence derived from human genome
CNKAFRDTFRLLLLCRWDKRRWRKIPKRPGSVHR

SEQ ID NO: 26865 - protein, 34 aa, Artificial Sequence
  Quasi-synthetic sequence derived from human genome
WMKKCYQMIDRRLRKNLKSFIIVHPSWFIRTILA

SEQ ID NO: 26866 - protein, 34 aa, Artificial Sequence
  Quasi-synthetic sequence derived from human genome
MASLRRVKVLLVLNLIAVAGFVLFLAKCRPIAVR

SEQ ID NO: 26867 - protein, 34 aa, Artificial Sequence
  Quasi-synthetic sequence derived from human genome
QSRIRMIIAVTSYKRYLWATVTIQRHWRAYLRRK

SEQ ID NO: 26868 - protein, 34 aa, Artificial Sequence
  Quasi-synthetic sequence derived from human genome
RFLGRHFPRFYVLYTIFMKGLQMLWADAKKARRI

SEQ ID NO: 26869 - protein, 34 aa, Artificial Sequence
  Quasi-synthetic sequence derived from human genome
ARKARKYEIPHFRLKKVENIKIWLSLRSYLKRRG

SEQ ID NO: 26870 - protein, 34 aa, Artificial Sequence
  Quasi-synthetic sequence derived from human genome
RIARILAGSKKKICTKKPRFMSACAQLVIAFILI

SEQ ID NO: 26871 - protein, 34 aa, Artificial Sequence
  Quasi-synthetic sequence derived from human genome
RLLRIFKITKYWASLRNLVVSLMSSMKSIISLLF

SEQ ID NO: 26872 - protein, 34 aa, Artificial Sequence
  Quasi-synthetic sequence derived from human genome
IFLAFFVVVSLVCLILLVKIKLKQRRSQNSMNRL

SEQ ID NO: 26873 - protein, 34 aa, Artificial Sequence
  Quasi-synthetic sequence derived from human genome
FFPSCLSSKCIAMKQGVIKSLKIKYRHCLIKKFL

SEQ ID NO: 26874 - protein, 34 aa, Artificial Sequence
  Quasi-synthetic sequence derived from human genome
WLLFLAHRVALAALPCRRGSRGFGMFYAVRRGRK

SEQ ID NO: 26875 - protein, 34 aa, Artificial Sequence
  Quasi-synthetic sequence derived from human genome
RLRPRRTKLYVMASVFVCLLLSGLAVFFLFPRSI

SEQ ID NO: 26876 - protein, 34 aa, Artificial Sequence
  Quasi-synthetic sequence derived from human genome
RLAWIKSFKPWLEIFKQNQQKKIVRRKRPVKCPA

SEQ ID NO: 26877 - protein, 34 aa, Artificial Sequence
  Quasi-synthetic sequence derived from human genome
LRLTPGLRKVLFATALGTVALALAAHQLKRRRRR

SEQ ID NO: 26878 - protein, 34 aa, Artificial Sequence
  Quasi-synthetic sequence derived from human genome
VPPLLKSFLQERLGIHLIRRKIVKPKHHVLMSRK

SEQ ID NO: 26879 - protein, 34 aa, Artificial Sequence
  Quasi-synthetic sequence derived from human genome
KHCKAFKIRKHYLHLRATVVSIQRRYRKLTAVRT

SEQ ID NO: 26880 - protein, 34 aa, Artificial Sequence
  Quasi-synthetic sequence derived from human genome
RTPMSWSRIKKILKEGPMLKNCNSFKRWKLRYFL

SEQ ID NO: 26881 - protein, 34 aa, Artificial Sequence
  Quasi-synthetic sequence derived from human genome
LGVALLFIVRKKRKEKRLKRLRDAKSLAEMLISK

SEQ ID NO: 26882 - protein, 34 aa, Artificial Sequence
  Quasi-synthetic sequence derived from human genome
RVRGRVLKKFKSDSGLAQRRFIRGWGLCIFLPFV

SEQ ID NO: 26883 - protein, 34 aa, Artificial Sequence
  Quasi-synthetic sequence derived from human genome
FFLSRRRRARSSVCRRKVAQAREKRFTFVLAVVM

SEQ ID NO: 26884 - protein, 34 aa, Artificial Sequence
  Quasi-synthetic sequence derived from human genome
RRTRRPRFVLMNKMDDLNLHYRFLNWRRRIREIR

SEQ ID NO: 26885 - protein, 34 aa, Artificial Sequence
  Quasi-synthetic sequence derived from human genome
MRRGWKMALSGGLRCCRRVLSWVPVLVIVLVVLW

SEQ ID NO: 26886 - protein, 34 aa, Artificial Sequence
  Quasi-synthetic sequence derived from human genome
LLIKKVTWTMNGLMLPTDIKRRKTKPVLSIRMKK

SEQ ID NO: 26887 - protein, 34 aa, Artificial Sequence
  Quasi-synthetic sequence derived from human genome
GLLFGAPALLGLALVLALVLVGLVSWRRRQRRLR

SEQ ID NO: 26888 - protein, 34 aa, Artificial Sequence
  Quasi-synthetic sequence derived from human genome
VKQGYVRIRSRRLGIYQRCWLVFKKASSKGPKRL

SEQ ID NO: 26889 - protein, 34 aa, Artificial Sequence
  Quasi-synthetic sequence derived from human genome
SFLNRLGKLLLHLFMVLCLTLFLNNIIKKILNLK

SEQ ID NO: 26890 - protein, 34 aa, Artificial Sequence
  Quasi-synthetic sequence derived from human genome
ILLVVVLGVVFGILIKRRQQKIRKYTMRRLLQET

SEQ ID NO: 26891 - protein, 34 aa, Artificial Sequence
  Quasi-synthetic sequence derived from human genome
LPPPFSLVPSPKSFVYFIMRIVNFPKCRRRRLQK

SEQ ID NO: 26892 - protein, 34 aa, Artificial Sequence
  Quasi-synthetic sequence derived from human genome
KLCSRFLLKCGFITIPWRCIKKCSPLMPRAAVPR

SEQ ID NO: 26893 - protein, 34 aa, Artificial Sequence
  Quasi-synthetic sequence derived from human genome
IHHLMKMIRDFSILFYRCRKAGLALSKHYKVYKR

SEQ ID NO: 26894 - protein, 34 aa, Artificial Sequence
  Quasi-synthetic sequence derived from human genome
KLFRSQRNLYISGFSLFFWLVLRRLVTLITQLAK

SEQ ID NO: 26895 - protein, 34 aa, Artificial Sequence
  Quasi-synthetic sequence derived from human genome
TVFLLAILGGMAFILLVLLCLLLYYCRRKCLKPR

SEQ ID NO: 26896 - protein, 34 aa, Artificial Sequence
  Quasi-synthetic sequence derived from human genome
LLFLMRKDKKKLRRLLKYMFIRDYKSKIVKGIDE

SEQ ID NO: 26897 - protein, 34 aa, Artificial Sequence
  Quasi-synthetic sequence derived from human genome
TIMGVRFKRSKKIMPAGLVAGLSLMMILRLVLLL

SEQ ID NO: 26898 - protein, 34 aa, Artificial Sequence
  Quasi-synthetic sequence derived from human genome
VVGFFAVLFFLWRSFRSVRSRLYVGREKKLALML

SEQ ID NO: 26899 - protein, 34 aa, Artificial Sequence
  Quasi-synthetic sequence derived from human genome
RRKEKMFRFFIRRMVKAQSFYWVVLCVVALNTLC

SEQ ID NO: 26900 - protein, 34 aa, Artificial Sequence
  Quasi-synthetic sequence derived from human genome
LWPRWLADKMLPLLGAVLLQKREKRGPLWRHWRR

SEQ ID NO: 26901 - protein, 34 aa, Artificial Sequence
  Quasi-synthetic sequence derived from human genome
VSKIQRFHARSLWTNHKRYGYKKHSYRLVKKLKL

SEQ ID NO: 26902 - protein, 34 aa, Artificial Sequence
  Quasi-synthetic sequence derived from human genome
LKLPWTQVGFSLLFLYLGSGGWRFIRVFIKTIRR

SEQ ID NO: 26903 - protein, 34 aa, Artificial Sequence
  Quasi-synthetic sequence derived from human genome
ILKAGRRWNKYFKSRRPLFTGGLIGGLFTYVLFW

SEQ ID NO: 26904 - protein, 34 aa, Artificial Sequence
  Quasi-synthetic sequence derived from human genome
RALYVKVQKRFLKSLIFYATATLIVFYGLKTAIR

SEQ ID NO: 26905 - protein, 34 aa, Artificial Sequence
  Quasi-synthetic sequence derived from human genome
VAWRRAWPRRRRRLQQVGTVAKLWIYPVKSCKGV

SEQ ID NO: 26906 - protein, 34 aa, Artificial Sequence
  Quasi-synthetic sequence derived from human genome
ARRNVFDLVRTLRVLLDSPVKRRLLPMLRLVIPR

SEQ ID NO: 26907 - protein, 34 aa, Artificial Sequence
  Quasi-synthetic sequence derived from human genome
FRTHHTGLLSVLAMFFLLVLILSSVFLFRLFKRR

SEQ ID NO: 26908 - protein, 34 aa, Artificial Sequence
  Quasi-synthetic sequence derived from human genome
RQSSFIAVGILGVVLLAIFVALFFLTKKRRQRQR

SEQ ID NO: 26909 - protein, 34 aa, Artificial Sequence
  Quasi-synthetic sequence derived from human genome
KAKVIYLMRNPRDVLVSGYFFWKNMKFIKKPKSW

SEQ ID NO: 26910 - protein, 34 aa, Artificial Sequence
  Quasi-synthetic sequence derived from human genome
ILLEQSLQSHKKLKLTKMRAKKKKKKKKKLKDVL

SEQ ID NO: 26911 - protein, 34 aa, Artificial Sequence
  Quasi-synthetic sequence derived from human genome
VWVIAVIVIAIVVGVAVICVVPYRYLQRRKKKGK

SEQ ID NO: 26912 - protein, 34 aa, Artificial Sequence
  Quasi-synthetic sequence derived from human genome
HKTFRIKRFLAKKQKQNRPIPQWIRMKTGNKIRY

SEQ ID NO: 26913 - protein, 34 aa, Artificial Sequence
  Quasi-synthetic sequence derived from human genome
RIGRILRLIKGAKGIRTLLFALMMSLPALFNIGL

SEQ ID NO: 26914 - protein, 34 aa, Artificial Sequence
  Quasi-synthetic sequence derived from human genome
RYLRVKLTVRFRIPGLPGCILSFQLKVCFLPVMW

SEQ ID NO: 26915 - protein, 34 aa, Artificial Sequence
  Quasi-synthetic sequence derived from human genome
LFRKKNKAAAVIQRAWRSYQLRKHLSHLRHMKQL

SEQ ID NO: 26916 - protein, 34 aa, Artificial Sequence
  Quasi-synthetic sequence derived from human genome
MVFPMWTLKRQILILFNIILISKLLGARWFPKTL

SEQ ID NO: 26917 - protein, 34 aa, Artificial Sequence
  Quasi-synthetic sequence derived from human genome
ALLVIQWNIRAFMGVKNWPWMKLYFKIKPLLKSA

SEQ ID NO: 26918 - protein, 34 aa, Artificial Sequence
  Quasi-synthetic sequence derived from human genome
KILIHRILTLFPNAIARKLLLMLTFILIFWIIYL

SEQ ID NO: 26919 - protein, 34 aa, Artificial Sequence
  Quasi-synthetic sequence derived from human genome
RQRIILRVWWSTWRQRLGQVRVSRALHASALKHR

SEQ ID NO: 26920 - protein, 34 aa, Artificial Sequence
  Quasi-synthetic sequence derived from human genome
VQRRKKRLRHRVPPRKPEPLVKLHRTALHWACLK

SEQ ID NO: 26921 - protein, 34 aa, Artificial Sequence
  Quasi-synthetic sequence derived from human genome
LSLRYDLTVPFARYLAMNKVKKMKRYHVGKVWRR

SEQ ID NO: 26922 - protein, 34 aa, Artificial Sequence
  Quasi-synthetic sequence derived from human genome
TICAKHKLYQFLHLRKAAITIQSSYRRLMVKKKL

SEQ ID NO: 26923 - protein, 34 aa, Artificial Sequence
  Quasi-synthetic sequence derived from human genome
WKNWLGVKRQPLWTLVLILWPVIIFIILAITRTK

SEQ ID NO: 26924 - protein, 34 aa, Artificial Sequence
  Quasi-synthetic sequence derived from human genome
IYAFVGEKFRRYLSVFFRKHITKRFCKQCPVFYR

SEQ ID NO: 26925 - protein, 34 aa, Artificial Sequence
  Quasi-synthetic sequence derived from human genome
WFRMVLERRHFLQMKRAAVTIQACWRSYRVRRAL

SEQ ID NO: 26926 - protein, 34 aa, Artificial Sequence
  Quasi-synthetic sequence derived from human genome
WALIAIAVVAGLLLLTCCFCICKKCCCKKKKNKK

SEQ ID NO: 26927 - protein, 34 aa, Artificial Sequence
  Quasi-synthetic sequence derived from human genome
RPLSSFVRKARHRRPLSSFVRKARHRRTLFASPL

SEQ ID NO: 26928 - protein, 34 aa, Artificial Sequence
  Quasi-synthetic sequence derived from human genome
WLRSPVQNFCYIFWKRYRFKLIAFMVISIIALML

SEQ ID NO: 26929 - protein, 34 aa, Artificial Sequence
  Quasi-synthetic sequence derived from human genome
VYRHQARHKAVVLRCHAVLLARAHKARALARLLR

SEQ ID NO: 26930 - protein, 34 aa, Artificial Sequence
  Quasi-synthetic sequence derived from human genome
LLRSARRRRRGRTDGRRFLLRRAVPGHLGLARAR

SEQ ID NO: 26931 - protein, 34 aa, Artificial Sequence
  Quasi-synthetic sequence derived from human genome
KSIYFLGHIFFLSLLFILPYIHKAMVPRKEKLKK

SEQ ID NO: 26932 - protein, 34 aa, Artificial Sequence
  Quasi-synthetic sequence derived from human genome
RRALRHDLGGKRLSKIATLRRAIHRIAALSLVLR

SEQ ID NO: 26933 - protein, 34 aa, Artificial Sequence
  Quasi-synthetic sequence derived from human genome
KMRAVALRAGWQQRRRSEKKITRLVLMVVVVFVL

SEQ ID NO: 26934 - protein, 34 aa, Artificial Sequence
  Quasi-synthetic sequence derived from human genome
LGYLGLSFSWVLLALALLAWCRRSRGLKALRLCR

SEQ ID NO: 26935 - protein, 34 aa, Artificial Sequence
  Quasi-synthetic sequence derived from human genome
RHMGIGKRKGTANARMPEKVTWMRRMRILRRLLR

SEQ ID NO: 26936 - protein, 34 aa, Artificial Sequence
  Quasi-synthetic sequence derived from human genome
RKIIMHKIRPHITTLRKYTYGKHILAKLEKYYLK

SEQ ID NO: 26937 - protein, 34 aa, Artificial Sequence
  Quasi-synthetic sequence derived from human genome
FKRAFVRILGCQCRGRGRRRRRRRRRLGGCAYTY

SEQ ID NO: 26938 - protein, 34 aa, Artificial Sequence
  Quasi-synthetic sequence derived from human genome
LMAKKRVIRMLIVIVVLFFLCWMPIFSANAWRAY

SEQ ID NO: 26939 - protein, 34 aa, Artificial Sequence
  Quasi-synthetic sequence derived from human genome
KKHGKLITFLRTFMKSRPTKQKLKQRGILKERVF

SEQ ID NO: 26940 - protein, 34 aa, Artificial Sequence
  Quasi-synthetic sequence derived from human genome
LRLMHIFTISKTLGPKIIIVKRMMKDVFFFLFLL

SEQ ID NO: 26941 - protein, 34 aa, Artificial Sequence
  Quasi-synthetic sequence derived from human genome
KKLILKQALIVVLQWCFNHNFSVRLYALVALKKL

SEQ ID NO: 26942 - protein, 34 aa, Artificial Sequence
  Quasi-synthetic sequence derived from human genome
YLLLLAFLQRRQRRRQDSRVVARSVRILVASFFL

SEQ ID NO: 26943 - protein, 34 aa, Artificial Sequence
  Quasi-synthetic sequence derived from human genome
TRRWKKKQLRRPSLLLLGCCSFGIMAPSLWKGLV

SEQ ID NO: 26944 - protein, 34 aa, Artificial Sequence
  Quasi-synthetic sequence derived from human genome
RGHPRSYPYWRRLLVLCWYLPGWRAGRVTWLRLA

SEQ ID NO: 26945 - protein, 34 aa, Artificial Sequence
  Quasi-synthetic sequence derived from human genome
LFHLLVQKSKKSSTFKFYRRHKMPAPAQRKLLPR

SEQ ID NO: 26946 - protein, 34 aa, Artificial Sequence
  Quasi-synthetic sequence derived from human genome
MSLCVVLYVASSLFLMVMYFFFRVRSRRWKVKHH

SEQ ID NO: 26947 - protein, 34 aa, Artificial Sequence
  Quasi-synthetic sequence derived from human genome
MALLRKINQVLLFLLIVTLCVILYKKVHKGTVPK

SEQ ID NO: 26948 - protein, 34 aa, Artificial Sequence
  Quasi-synthetic sequence derived from human genome
FFVRLGPMALAFKVRGLLDCKHSWKRLKDIRKIF

SEQ ID NO: 26949 - protein, 34 aa, Artificial Sequence
  Quasi-synthetic sequence derived from human genome
KSLLMLFLWAVSALSFLLGLADLVCSLRRRMRRR

SEQ ID NO: 26950 - protein, 34 aa, Artificial Sequence
  Quasi-synthetic sequence derived from human genome
FKYRILQILRVQNQFLWEKYKRKKEYMNRKMFGR

SEQ ID NO: 26951 - protein, 34 aa, Artificial Sequence
  Quasi-synthetic sequence derived from human genome
TKLFLNLATLLPFCVCLMSFFLLILSLRRHIRRM

SEQ ID NO: 26952 - protein, 34 aa, Artificial Sequence
  Quasi-synthetic sequence derived from human genome
GLVIIIAVCCASLVFLTVLVIICYKAIKRKPLRK

SEQ ID NO: 26953 - protein, 34 aa, Artificial Sequence
  Quasi-synthetic sequence derived from human genome
VVKQPAFIAGIGGACWVILMGFSIWLYWRRKKRK

SEQ ID NO: 26954 - protein, 34 aa, Artificial Sequence
  Quasi-synthetic sequence derived from human genome
FLKIANFSNSIFLYLKWRVKKVVLVLLLVTSVFL

SEQ ID NO: 26955 - protein, 34 aa, Artificial Sequence
  Quasi-synthetic sequence derived from human genome
LLIVVKVRAAGVRVGCVRRRSERKVTRMVLVVVL

SEQ ID NO: 26956 - protein, 34 aa, Artificial Sequence
  Quasi-synthetic sequence derived from human genome
FRRPKTLRLRRQPKYPRKSAPRRNKLDHYAIIKF

SEQ ID NO: 26957 - protein, 34 aa, Artificial Sequence
  Quasi-synthetic sequence derived from human genome
FILLGVFGGLWGAFFIRANIAWCRRRKSTKFGKY

SEQ ID NO: 26958 - protein, 34 aa, Artificial Sequence
  Quasi-synthetic sequence derived from human genome
MDSEVYKTARALRIVRFTKILSLLRLLRLSRLIR

SEQ ID NO: 26959 - protein, 34 aa, Artificial Sequence
  Quasi-synthetic sequence derived from human genome
KFLFLAKQCRSVLCCRSTPLQKSMVVKLVRSKLK

SEQ ID NO: 26960 - protein, 34 aa, Artificial Sequence
  Quasi-synthetic sequence derived from human genome
KLFAPVRISITLVSVPLIVRYFRKVGFFKPPAAK

SEQ ID NO: 26961 - protein, 34 aa, Artificial Sequence
  Quasi-synthetic sequence derived from human genome
KRWIFWLWWRACWFVITPILLIAIFIWSLVQFHR

SEQ ID NO: 26962 - protein, 34 aa, Artificial Sequence
  Quasi-synthetic sequence derived from human genome
KKLFLQLIAEFKRLGSSVIYANFNRIILCTKKRR

SEQ ID NO: 26963 - protein, 34 aa, Artificial Sequence
  Quasi-synthetic sequence derived from human genome
RGKNPLLVPLLYDFRRMTARRRVNRKMGFHVIYK

SEQ ID NO: 26964 - protein, 34 aa, Artificial Sequence
  Quasi-synthetic sequence derived from human genome
KVRIFGLKKRRLRRQDPQLKGIVTRLYCRQGYYL

SEQ ID NO: 26965 - protein, 34 aa, Artificial Sequence
  Quasi-synthetic sequence derived from human genome
ARRARKSEVPHFRLKKVQNIKMWLSLRSYLKRRG

SEQ ID NO: 26966 - protein, 34 aa, Artificial Sequence
  Quasi-synthetic sequence derived from human genome
PLRIRRLLRPFFLLQNSSMMKKTLKCIRWSLPEM

SEQ ID NO: 26967 - protein, 34 aa, Artificial Sequence
  Quasi-synthetic sequence derived from human genome
KYLLLGRWRKKHLTFRILNLPSTLPPHTARAALR

SEQ ID NO: 26968 - protein, 34 aa, Artificial Sequence
  Quasi-synthetic sequence derived from human genome
VVKGLMKKFIRCSTRVTVGTIKKFLSLKLKLPSS

SEQ ID NO: 26969 - protein, 34 aa, Artificial Sequence
  Quasi-synthetic sequence derived from human genome
KQHREASKQLLLWRLPNVLIVQLKRFSFRSFIWR

SEQ ID NO: 26970 - protein, 34 aa, Artificial Sequence
  Quasi-synthetic sequence derived from human genome
FKKFDHRYLRKILIRKNLPKSSIVSLYKKLEMKQ

SEQ ID NO: 26971 - protein, 34 aa, Artificial Sequence
  Quasi-synthetic sequence derived from human genome
RLLRIFKVTKYWSSLRNLVVSLLNSMKSIISLLF

SEQ ID NO: 26972 - protein, 34 aa, Artificial Sequence
  Quasi-synthetic sequence derived from human genome
MGKKINKLFCFNFLVQCFRGKSKPSKCQIRKKVK

SEQ ID NO: 26973 - protein, 34 aa, Artificial Sequence
  Quasi-synthetic sequence derived from human genome
IRLMLKYQKILWKVPSFLITQVRRMNEATMLLKK

SEQ ID NO: 26974 - protein, 34 aa, Artificial Sequence
  Quasi-synthetic sequence derived from human genome
RTGKRLNIRKVIPYIASQFRKDKIWLRRTKPSKR

SEQ ID NO: 26975 - protein, 34 aa, Artificial Sequence
  Quasi-synthetic sequence derived from human genome
RRRKELFRKKNKAAAVIQRAWRSYQLRKHLSHLR

SEQ ID NO: 26976 - protein, 34 aa, Artificial Sequence
  Quasi-synthetic sequence derived from human genome
RKKAKPRIFFLFNDILVYGSIVLNKRKYRSQHII

SEQ ID NO: 26977 - protein, 34 aa, Artificial Sequence
  Quasi-synthetic sequence derived from human genome
RVAKKRAPKVLGTTLVVGLLAGVGYFAFMLFRKR

SEQ ID NO: 26978 - protein, 34 aa, Artificial Sequence
  Quasi-synthetic sequence derived from human genome
LITLWVLFVFTIVGNSVVLFSTWRRKKKSRMTFF

SEQ ID NO: 26979 - protein, 34 aa, Artificial Sequence
  Quasi-synthetic sequence derived from human genome
RYLTRRRRIEIAHALCLTERQIKIWFQNRRMKWK

SEQ ID NO: 26980 - protein, 34 aa, Artificial Sequence
  Quasi-synthetic sequence derived from human genome
RTQCLLGLRTFVAFAAKLWSFFIYLLRRQIRTVI

SEQ ID NO: 26981 - protein, 34 aa, Artificial Sequence
  Quasi-synthetic sequence derived from human genome
LKAFILFGKLARVVGMSKKHFFKGEVKKAWIPLM

SEQ ID NO: 26982 - protein, 34 aa, Artificial Sequence
  Quasi-synthetic sequence derived from human genome
WFRLSFVYNHYLFFACILVVLLAIFLYLLRLRRI

SEQ ID NO: 26983 - protein, 34 aa, Artificial Sequence
  Quasi-synthetic sequence derived from human genome
YLVRSLYQLIRMATITMQAYSRGFLARRRYRKML

SEQ ID NO: 26984 - protein, 34 aa, Artificial Sequence
  Quasi-synthetic sequence derived from human genome
RPMTAKKKPNFILLLKALLLSSYGKLLLIPAVIW

SEQ ID NO: 26985 - protein, 34 aa, Artificial Sequence
  Quasi-synthetic sequence derived from human genome
VPLSVLILSLLLVFIMSVFVAAGLFVLVMKRRKK

SEQ ID NO: 26986 - protein, 34 aa, Artificial Sequence
  Quasi-synthetic sequence derived from human genome
KILCHKFMRFMMMRAENFFILRRKPVEQKKIFTI

SEQ ID NO: 26987 - protein, 34 aa, Artificial Sequence
  Quasi-synthetic sequence derived from human genome
VRIRGTRMYQPLTEDEIRIFKRKKRIKRRALLFL

SEQ ID NO: 26988 - protein, 34 aa, Artificial Sequence
  Quasi-synthetic sequence derived from human genome
RTYKQRFLFAKLFSHITSARKARKYEIPHFRLKK

SEQ ID NO: 26989 - protein, 34 aa, Artificial Sequence
  Quasi-synthetic sequence derived from human genome
IRAALISRRHLQFWKSHLKKVQKPLLQAPFLPPK

SEQ ID NO: 26990 - protein, 34 aa, Artificial Sequence
  Quasi-synthetic sequence derived from human genome
KKPIRRRPRADVVVVRGKIRLYSPSGFFLILGVL

SEQ ID NO: 26991 - protein, 34 aa, Artificial Sequence
  Quasi-synthetic sequence derived from human genome
SLKVLKKYPRLWCMTKPPSRRPKLYIVNLQWTPK

SEQ ID NO: 26992 - protein, 34 aa, Artificial Sequence
  Quasi-synthetic sequence derived from human genome
LKLHRVLKVFLSRTAQRIPYMTGGRVMRMLAVIL

SEQ ID NO: 26993 - protein, 34 aa, Artificial Sequence
  Quasi-synthetic sequence derived from human genome
RRTRSGVGWKRVLRSLCHSRTRVPLLAAIYFLMI

SEQ ID NO: 26994 - protein, 34 aa, Artificial Sequence
  Quasi-synthetic sequence derived from human genome
ALRRPPRLRLCARLPDFFLLLLFRGCLIGAVNLK

SEQ ID NO: 26995 - protein, 34 aa, Artificial Sequence
  Quasi-synthetic sequence derived from human genome
LIETYFVSPTLFRVIRLARIGRILRLVKGAKGIR

SEQ ID NO: 26996 - protein, 34 aa, Artificial Sequence
  Quasi-synthetic sequence derived from human genome
RWIYMLSSVFQKQFYRLGGFRVCHKLIFMIIQKL

SEQ ID NO: 26997 - protein, 34 aa, Artificial Sequence
  Quasi-synthetic sequence derived from human genome
KRKFKSLLLHKRTAIQHAYRLLISQRRPAGISYR

SEQ ID NO: 26998 - protein, 34 aa, Artificial Sequence
  Quasi-synthetic sequence derived from human genome
KGKKCIVLVTELMTSGTLKTYLKRFKVMKIKVLR

SEQ ID NO: 26999 - protein, 34 aa, Artificial Sequence
  Quasi-synthetic sequence derived from human genome
VLSVLKHSLLSFKRRRAMETLKLYFLFSLQLLIK

SEQ ID NO: 27000 - protein, 34 aa, Artificial Sequence
  Quasi-synthetic sequence derived from human genome
LFVAGGTVLLLLFVISITTIIVIFLNRRRRRERR

SEQ ID NO: 27001 - protein, 35 aa, Artificial Sequence
  Quasi-synthetic sequence derived from human genome
IRIFKRKKRIKRRALLFLSYILTHFIFLALLLILI

SEQ ID NO: 27002 - protein, 35 aa, Artificial Sequence
  Quasi-synthetic sequence derived from human genome
PKRKKKKKFCYLCILLLIVLFILLCCLYRLCKKSK

SEQ ID NO: 27003 - protein, 35 aa, Artificial Sequence
  Quasi-synthetic sequence derived from human genome
WLRVRKARPQLILSRRPRRRLGSLRWCGRRRLRWR

SEQ ID NO: 27004 - protein, 35 aa, Artificial Sequence
  Quasi-synthetic sequence derived from human genome
VKRFLKHAGKWSLRWFLSPRWILQFRRWARKWSRF

SEQ ID NO: 27005 - protein, 35 aa, Artificial Sequence
  Quasi-synthetic sequence derived from human genome
LLVILAMGLWVIRVQKRHKMPRMKKLMRNRMKLRK

SEQ ID NO: 27006 - protein, 35 aa, Artificial Sequence
  Quasi-synthetic sequence derived from human genome
RWTHLLRLLRLIILLRIFHLFHQKRQLEKLIRRRV

SEQ ID NO: 27007 - protein, 35 aa, Artificial Sequence
  Quasi-synthetic sequence derived from human genome
KRLVKLHIKRHYHKKFWKLGAVIFFFIIVLVLMQR

SEQ ID NO: 27008 - protein, 35 aa, Artificial Sequence
  Quasi-synthetic sequence derived from human genome
RIPLLRKRWFQLGRSMNPRARKKRSRIPLLRKRRF

SEQ ID NO: 27009 - protein, 35 aa, Artificial Sequence
  Quasi-synthetic sequence derived from human genome
KRWTHLVRLLRLIILIRIFHLLHQKRQLEKLMRRL

SEQ ID NO: 27010 - protein, 35 aa, Artificial Sequence
  Quasi-synthetic sequence derived from human genome
FLARKQYRKVLYCVVIIQKNYRAFLLRRRFLHLKK

SEQ ID NO: 27011 - protein, 35 aa, Artificial Sequence
  Quasi-synthetic sequence derived from human genome
FLAKQRLRKRVNAALVIQKYWRRVLAQRKLLMLKK

SEQ ID NO: 27012 - protein, 35 aa, Artificial Sequence
  Quasi-synthetic sequence derived from human genome
KFWRRYGKLSRHLMKVKLKKYTKFLFVRDPFVRLI

SEQ ID NO: 27013 - protein, 35 aa, Artificial Sequence
  Quasi-synthetic sequence derived from human genome
LFRLLLRFLRLCRSFYITCRRLRCFPQPPRRNWLL

SEQ ID NO: 27014 - protein, 35 aa, Artificial Sequence
  Quasi-synthetic sequence derived from human genome
KLSRRWRRWNRFNRRRCRAAVKSVTFYWLVIVLVF

SEQ ID NO: 27015 - protein, 35 aa, Artificial Sequence
  Quasi-synthetic sequence derived from human genome
RLCLRLLLLLGYRRRCPPLLRGLVQRWRYGKVCLR

SEQ ID NO: 27016 - protein, 35 aa, Artificial Sequence
  Quasi-synthetic sequence derived from human genome
KRRKMSKKLPPVIIKYIIINRFRGRKNMLVKLGKI

SEQ ID NO: 27017 - protein, 35 aa, Artificial Sequence
  Quasi-synthetic sequence derived from human genome
KFSRYWRRWNRFCRRKCRAAVKSNVFYWLVIFLVF

SEQ ID NO: 27018 - protein, 35 aa, Artificial Sequence
  Quasi-synthetic sequence derived from human genome
TLKKKRRNFAELKIKRLRKKFAQKMLRKARRKLIY

SEQ ID NO: 27019 - protein, 35 aa, Artificial Sequence
  Quasi-synthetic sequence derived from human genome
WPRFIRHKCKQRFTKITQYLIRIRKLTLKRQRKLV

SEQ ID NO: 27020 - protein, 35 aa, Artificial Sequence
  Quasi-synthetic sequence derived from human genome
RLLKRLLGPKLRRFLKPQGHPRLLLWFKRGLALAA

SEQ ID NO: 27021 - protein, 35 aa, Artificial Sequence
  Quasi-synthetic sequence derived from human genome
WRRRSCWRKWKQLSRLQRNMILFLLAFLLFCGLLF

SEQ ID NO: 27022 - protein, 35 aa, Artificial Sequence
  Quasi-synthetic sequence derived from human genome
ALLFLLFFLTLRFSVVKRGRKKLLYIFKQPFMRPV

SEQ ID NO: 27023 - protein, 35 aa, Artificial Sequence
  Quasi-synthetic sequence derived from human genome
RWTHLVRLLRLIILIRIFHLLHQKRQLEKLMRRLV

SEQ ID NO: 27024 - protein, 35 aa, Artificial Sequence
  Quasi-synthetic sequence derived from human genome
RMPFRRKIYYLPRRYKFMSRIDKQISRFRRWLPKK

SEQ ID NO: 27025 - protein, 35 aa, Artificial Sequence
  Quasi-synthetic sequence derived from human genome
FFLQIYLIMIFLGLYINFRHLYKQRRRRYGQKKKK

SEQ ID NO: 27026 - protein, 35 aa, Artificial Sequence
  Quasi-synthetic sequence derived from human genome
RFLKIIRPLRNIFLKKPVFAKTVSIFIWFFLFFIS

SEQ ID NO: 27027 - protein, 35 aa, Artificial Sequence
  Quasi-synthetic sequence derived from human genome
LRRIILLQRWFRVLLCRQHFLHLRQASVIIQRFWR

SEQ ID NO: 27028 - protein, 35 aa, Artificial Sequence
  Quasi-synthetic sequence derived from human genome
IVTLLVYIKIYIVLRRRRKRVNTKRSSRAFRAHLR

SEQ ID NO: 27029 - protein, 35 aa, Artificial Sequence
  Quasi-synthetic sequence derived from human genome
LIVRVLVRAHRHRGLRPRRQKALRMILAVVLVFFV

SEQ ID NO: 27030 - protein, 35 aa, Artificial Sequence
  Quasi-synthetic sequence derived from human genome
RIPLLRKRRFQLGRSMNPRARKNRSRIPLLRKRRF

SEQ ID NO: 27031 - protein, 35 aa, Artificial Sequence
  Quasi-synthetic sequence derived from human genome
RKRMGLKMLMMMALLVPLVYTIKRHKWSVLKSRKL

SEQ ID NO: 27032 - protein, 35 aa, Artificial Sequence
  Quasi-synthetic sequence derived from human genome
KPMRWPFFLFIPFFIIFCVLIAIMVKVNFQRKKWR

SEQ ID NO: 27033 - protein, 35 aa, Artificial Sequence
  Quasi-synthetic sequence derived from human genome
RFLRLHCGLWVRRKAGYKKKLWKKTPARKKRLREF

SEQ ID NO: 27034 - protein, 35 aa, Artificial Sequence
  Quasi-synthetic sequence derived from human genome
IGFFRRKLIDAVGFSPLRILRKRNKALRKIRKLQK

SEQ ID NO: 27035 - protein, 35 aa, Artificial Sequence
  Quasi-synthetic sequence derived from human genome
TVKIAGVIAGILLFVIIFLGVVLVMKKRKLAKKRK

SEQ ID NO: 27036 - protein, 35 aa, Artificial Sequence
  Quasi-synthetic sequence derived from human genome
LARWRCRRLRAIYTIMRWFRRHKVRAHLAELQRRF

SEQ ID NO: 27037 - protein, 35 aa, Artificial Sequence
  Quasi-synthetic sequence derived from human genome
RIPLLRKRRFQLYRSTNPRARKNRSRIPLLRKRRF

SEQ ID NO: 27038 - protein, 35 aa, Artificial Sequence
  Quasi-synthetic sequence derived from human genome
RAFLLRRRFLHLKKAAIVFQKQLRGQIARRVYRQL

SEQ ID NO: 27039 - protein, 35 aa, Artificial Sequence
  Quasi-synthetic sequence derived from human genome
KPKLSKFILISSLAILLMVSLLLLSLWKLWRVKKF

SEQ ID NO: 27040 - protein, 35 aa, Artificial Sequence
  Quasi-synthetic sequence derived from human genome
KFLRRTKAATIIQKYWRMYVVRRRYKIRRAATIVL

SEQ ID NO: 27041 - protein, 35 aa, Artificial Sequence
  Quasi-synthetic sequence derived from human genome
LVRKRRFQLRRCMNPRARKNRSQIVLFQKRRFHFF

SEQ ID NO: 27042 - protein, 35 aa, Artificial Sequence
  Quasi-synthetic sequence derived from human genome
KTMKFILWRRFRWAIILFIILFILLLFLAIFIYAF

SEQ ID NO: 27043 - protein, 35 aa, Artificial Sequence
  Quasi-synthetic sequence derived from human genome
NRRLKSQILLKKYLMKRRWKKNFIAVSAANRFKKI

SEQ ID NO: 27044 - protein, 35 aa, Artificial Sequence
  Quasi-synthetic sequence derived from human genome
MLVTISCILVGVLLLFVLLLVVRRRRREQRLKRLR

SEQ ID NO: 27045 - protein, 35 aa, Artificial Sequence
  Quasi-synthetic sequence derived from human genome
WKVLKVVAKVIRALLRILCCLLKAICRVLSIPVRV

SEQ ID NO: 27046 - protein, 35 aa, Artificial Sequence
  Quasi-synthetic sequence derived from human genome
LIQRRFRTLMMRRRFLSLKKTAILIQRKYRAHLCT

SEQ ID NO: 27047 - protein, 35 aa, Artificial Sequence
  Quasi-synthetic sequence derived from human genome
LSLLVLFFSAVFVAAGLFAYVLRRRRKKLPFRSKR

SEQ ID NO: 27048 - protein, 35 aa, Artificial Sequence
  Quasi-synthetic sequence derived from human genome
IRNIGIWFFWIRLYKIRRGRTRPQALLFLCMILLL

SEQ ID NO: 27049 - protein, 35 aa, Artificial Sequence
  Quasi-synthetic sequence derived from human genome
RRLRRLAHLVLFCPFSKRLQGRLPGLRVRCIFLAW

SEQ ID NO: 27050 - protein, 35 aa, Artificial Sequence
  Quasi-synthetic sequence derived from human genome
LPLLLRLLLSCLLLPAARLARQYLLPLLRRLARRL

SEQ ID NO: 27051 - protein, 35 aa, Artificial Sequence
  Quasi-synthetic sequence derived from human genome
RIPLLRKRWFQLGHSMNPRARKNRSRIPLLRKRRF

SEQ ID NO: 27052 - protein, 35 aa, Artificial Sequence
  Quasi-synthetic sequence derived from human genome
VRLASLNQILDPWVYLLLRKILLRKFCQMRKRRLR

SEQ ID NO: 27053 - protein, 35 aa, Artificial Sequence
  Quasi-synthetic sequence derived from human genome
LFLLALLGLVVKRAVERRKALSRRARRLAVRMRAL

SEQ ID NO: 27054 - protein, 35 aa, Artificial Sequence
  Quasi-synthetic sequence derived from human genome
RFRSLLVRRRFISLKKATIFVQRKYRATICAKHKL

SEQ ID NO: 27055 - protein, 35 aa, Artificial Sequence
  Quasi-synthetic sequence derived from human genome
LLRLLNKLTKWKHSRTMMLVVFKSAPILKRALKVK

SEQ ID NO: 27056 - protein, 35 aa, Artificial Sequence
  Quasi-synthetic sequence derived from human genome
KKIWWIIRGPMMLCVTVNFFIFLKILKLLISKLKA

SEQ ID NO: 27057 - protein, 35 aa, Artificial Sequence
  Quasi-synthetic sequence derived from human genome
LVILAMGLWVIRVQKRHKMPRMKKLMRNRMKLRKE

SEQ ID NO: 27058 - protein, 35 aa, Artificial Sequence
  Quasi-synthetic sequence derived from human genome
LVTLLIWVPVKVILHKKRYIYRKIKGWRPVLMMCV

SEQ ID NO: 27059 - protein, 35 aa, Artificial Sequence
  Quasi-synthetic sequence derived from human genome
LFRVIRLARIGRILRLIRGAKGIRTLLFALMMSLP

SEQ ID NO: 27060 - protein, 35 aa, Artificial Sequence
  Quasi-synthetic sequence derived from human genome
RVVKIAGISAGILVFILLLLVVILIVKKSKLAKKR

SEQ ID NO: 27061 - protein, 35 aa, Artificial Sequence
  Quasi-synthetic sequence derived from human genome
LLRILNKLTKWKHSRTMMLVVFKSAPILKRALKVK

SEQ ID NO: 27062 - protein, 35 aa, Artificial Sequence
  Quasi-synthetic sequence derived from human genome
YVVRRRYKIRRAATIVLQSYLRGFLARNRYRKILR

SEQ ID NO: 27063 - protein, 35 aa, Artificial Sequence
  Quasi-synthetic sequence derived from human genome
RIPLLRKRRFQLYRSMNPRARKNRSHIPLVRKRRF

SEQ ID NO: 27064 - protein, 35 aa, Artificial Sequence
  Quasi-synthetic sequence derived from human genome
RGKMMQRRPRSAEVKYFYFFKILLRLRLAILKYLF

SEQ ID NO: 27065 - protein, 35 aa, Artificial Sequence
  Quasi-synthetic sequence derived from human genome
MVGALLLLLVVALGIGLFMRRRHIVRKRTLRRLLQ

SEQ ID NO: 27066 - protein, 35 aa, Artificial Sequence
  Quasi-synthetic sequence derived from human genome
MAGCTRKLTHLRKRIHRPRRRTTRRWKRWFKFRKR

SEQ ID NO: 27067 - protein, 35 aa, Artificial Sequence
  Quasi-synthetic sequence derived from human genome
RIPLLRKRRFQLGRSMNLRARKNRSQIVLFQKRRF

SEQ ID NO: 27068 - protein, 35 aa, Artificial Sequence
  Quasi-synthetic sequence derived from human genome
VLGFLRVVRFVRILRIFKLTRHFVGLRVLGHTLRA

SEQ ID NO: 27069 - protein, 35 aa, Artificial Sequence
  Quasi-synthetic sequence derived from human genome
LWVILLSAFAGLLLLMLLILALWKIGFFKRPLKKK

SEQ ID NO: 27070 - protein, 35 aa, Artificial Sequence
  Quasi-synthetic sequence derived from human genome
MKHFLRMLIQVCLYFYCKFLWRCLKFVMRKLTGRC

SEQ ID NO: 27071 - protein, 35 aa, Artificial Sequence
  Quasi-synthetic sequence derived from human genome
KYFVSPTLFRVIRLARIGRVLRLIRGAKGIRTLLF

SEQ ID NO: 27072 - protein, 35 aa, Artificial Sequence
  Quasi-synthetic sequence derived from human genome
FALRRKKKKTIKMLMLVVVLFALCWFPLNCYVLLL

SEQ ID NO: 27073 - protein, 35 aa, Artificial Sequence
  Quasi-synthetic sequence derived from human genome
YLNRKIVQVMRKQKTINRFLMRKRLLFPALVTLLI

SEQ ID NO: 27074 - protein, 35 aa, Artificial Sequence
  Quasi-synthetic sequence derived from human genome
RIPLLRKRRFQLCRCMNPRARKNRSQIVLFQKLRF

SEQ ID NO: 27075 - protein, 35 aa, Artificial Sequence
  Quasi-synthetic sequence derived from human genome
RAARPPLLLRPVKLLRRRFRLLLALAVVSVGLWTL

SEQ ID NO: 27076 - protein, 35 aa, Artificial Sequence
  Quasi-synthetic sequence derived from human genome
RGVLVRRTLLVAALRAWMIQCWWRTLVQRRIRQRR

SEQ ID NO: 27077 - protein, 35 aa, Artificial Sequence
  Quasi-synthetic sequence derived from human genome
LLRLLGLRRGLRRLRRLWAGPRVQRGRGRGRGRGW

SEQ ID NO: 27078 - protein, 35 aa, Artificial Sequence
  Quasi-synthetic sequence derived from human genome
LRKLKFSPIKYGYQPRRNFWPARLATRLLKLRYLI

SEQ ID NO: 27079 - protein, 35 aa, Artificial Sequence
  Quasi-synthetic sequence derived from human genome
WKFFMARVRLQLKIILCFSPVGRTLRVRARKFPAI

SEQ ID NO: 27080 - protein, 35 aa, Artificial Sequence
  Quasi-synthetic sequence derived from human genome
RLLKRLLGPKLRRFLKPQGHPRLLLWFKRDPRPWS

SEQ ID NO: 27081 - protein, 35 aa, Artificial Sequence
  Quasi-synthetic sequence derived from human genome
RALALFVLTCVVLTFLGHRLLKRLLGPKLRRFLKP

SEQ ID NO: 27082 - protein, 35 aa, Artificial Sequence
  Quasi-synthetic sequence derived from human genome
AGMKRALGRRKGVWLRLRKILFCVLGLYIAIPFLI

SEQ ID NO: 27083 - protein, 35 aa, Artificial Sequence
  Quasi-synthetic sequence derived from human genome
LSIMSKFKLLSSLPRWRRIAQKIIRERRKKRVPKK

SEQ ID NO: 27084 - protein, 35 aa, Artificial Sequence
  Quasi-synthetic sequence derived from human genome
LKLTCSAFRLQRALRFLLGRLPWRVASGARRFRRW

SEQ ID NO: 27085 - protein, 35 aa, Artificial Sequence
  Quasi-synthetic sequence derived from human genome
KKKKKRYLRASSNRNFLLTMRPFLKRAILVLSYVL

SEQ ID NO: 27086 - protein, 35 aa, Artificial Sequence
  Quasi-synthetic sequence derived from human genome
KTAFRIYAVSTLLLFLLFFLFRLLLRFLRLCRSFY

SEQ ID NO: 27087 - protein, 35 aa, Artificial Sequence
  Quasi-synthetic sequence derived from human genome
GVIGGLFILVIVGLTFAVYVRRKSIKKKRALRRFL

SEQ ID NO: 27088 - protein, 35 aa, Artificial Sequence
  Quasi-synthetic sequence derived from human genome
ARLWKWLKSPRSWRLGLALLLGGALLFWVLLHRRW

SEQ ID NO: 27089 - protein, 35 aa, Artificial Sequence
  Quasi-synthetic sequence derived from human genome
FFIKRRFRSLRHKIILLQSRARGYLARQRYQQMRR

SEQ ID NO: 27090 - protein, 35 aa, Artificial Sequence
  Quasi-synthetic sequence derived from human genome
YLIYNLLQAVFFVLFVLSVHYLWKKWKKHQKKLKK

SEQ ID NO: 27091 - protein, 35 aa, Artificial Sequence
  Quasi-synthetic sequence derived from human genome
RRQMWWRGCKIKAIMALVAAILLLVIIILIVMKYR

SEQ ID NO: 27092 - protein, 35 aa, Artificial Sequence
  Quasi-synthetic sequence derived from human genome
LVLIVLVTLIFCLIVLSLSTFHIHKRRMKKRKMQR

SEQ ID NO: 27093 - protein, 35 aa, Artificial Sequence
  Quasi-synthetic sequence derived from human genome
RIPLLRKRRFQLYRSTNPRARKNRSRIPLLRKHRF

SEQ ID NO: 27094 - protein, 35 aa, Artificial Sequence
  Quasi-synthetic sequence derived from human genome
IILAVVGGVIGLLILILLIKKLIIFILKKTREKKK

SEQ ID NO: 27095 - protein, 35 aa, Artificial Sequence
  Quasi-synthetic sequence derived from human genome
FSRSKKKKKKKKKRQCFAFLIYFRLGIKMGKQGII

SEQ ID NO: 27096 - protein, 35 aa, Artificial Sequence
  Quasi-synthetic sequence derived from human genome
LLTLALLTVNALLVLLALAAWASRWLRRKLRARRK

SEQ ID NO: 27097 - protein, 35 aa, Artificial Sequence
  Quasi-synthetic sequence derived from human genome
RLLRLIILIRIFHLLHQKRQLEKLMRRLVSENKRR

SEQ ID NO: 27098 - protein, 35 aa, Artificial Sequence
  Quasi-synthetic sequence derived from human genome
SREFKRAFLRLLRCQCRRRRRRRPLWRVYGHHWRA

SEQ ID NO: 27099 - protein, 35 aa, Artificial Sequence
  Quasi-synthetic sequence derived from human genome
LLRKRRFQLYRSMNSRARKNRSQIVLFQKRRFHFF

SEQ ID NO: 27100 - protein, 35 aa, Artificial Sequence
  Quasi-synthetic sequence derived from human genome
VLKIRRRKMNHHKYRKLVKKTRFLRRKVQEGRLRR

SEQ ID NO: 27101 - protein, 35 aa, Artificial Sequence
  Quasi-synthetic sequence derived from human genome
LVLLVSLGVAIHLCCRRRRARLRFMKQKFNIVCLK

SEQ ID NO: 27102 - protein, 35 aa, Artificial Sequence
  Quasi-synthetic sequence derived from human genome
KIFKCYFKHTLQQKVFILFLTLWLLSLLKLLNVRR

SEQ ID NO: 27103 - protein, 35 aa, Artificial Sequence
  Quasi-synthetic sequence derived from human genome
WLLRKKYLRMRKAAITMQRYVRGYQARCYAKFLRR

SEQ ID NO: 27104 - protein, 35 aa, Artificial Sequence
  Quasi-synthetic sequence derived from human genome
PILKRALKVKQAMLQLYVLKLLKLQTKYLGRQWRK

SEQ ID NO: 27105 - protein, 35 aa, Artificial Sequence
  Quasi-synthetic sequence derived from human genome
GGLSVLRTFRLLRVLKLVRFLPALRRQLVVLVKTM

SEQ ID NO: 27106 - protein, 35 aa, Artificial Sequence
  Quasi-synthetic sequence derived from human genome
RGGATRAAGVFYPWRFRLLCLLRRWLPRPRAWFIR

SEQ ID NO: 27107 - protein, 35 aa, Artificial Sequence
  Quasi-synthetic sequence derived from human genome
LPLRTFRVFRALKAISVVSRLKVIVGALLRSVKKL

SEQ ID NO: 27108 - protein, 35 aa, Artificial Sequence
  Quasi-synthetic sequence derived from human genome
RRLQARRFRRSRRTGRLVVLIILTFAAFWLPYHVV

SEQ ID NO: 27109 - protein, 35 aa, Artificial Sequence
  Quasi-synthetic sequence derived from human genome
RKFFLFYRQQKWASGVIAIAWLLYCHKTRLKKILK

SEQ ID NO: 27110 - protein, 35 aa, Artificial Sequence
  Quasi-synthetic sequence derived from human genome
KCKKKQKSTKKFWIQKLPKVLCLHLKRFHWTAYLR

SEQ ID NO: 27111 - protein, 35 aa, Artificial Sequence
  Quasi-synthetic sequence derived from human genome
WLKVFYCLRIANFNHPLFFLMKRKIIVLMPWLLRL

SEQ ID NO: 27112 - protein, 35 aa, Artificial Sequence
  Quasi-synthetic sequence derived from human genome
RLKNIRKVYGRCMWYRLRLLKPQPNIIPTVKKIVL

SEQ ID NO: 27113 - protein, 35 aa, Artificial Sequence
  Quasi-synthetic sequence derived from human genome
QLGAGLKVLFKKTHRILRRLFNLCKRCHRQPRFRL

SEQ ID NO: 27114 - protein, 35 aa, Artificial Sequence
  Quasi-synthetic sequence derived from human genome
KLFFIKNQRSSLRIRLFNFSLKLLTCLLYIVRVLL

SEQ ID NO: 27115 - protein, 35 aa, Artificial Sequence
  Quasi-synthetic sequence derived from human genome
RRRRRLRRRPRGLRCSRLPPPPPLPLLLGLLLAAA

SEQ ID NO: 27116 - protein, 35 aa, Artificial Sequence
  Quasi-synthetic sequence derived from human genome
RVCRRLRRANRVLRARCRRAVKSNACYWAVLLLVF

SEQ ID NO: 27117 - protein, 35 aa, Artificial Sequence
  Quasi-synthetic sequence derived from human genome
RARRRRRRRRRRDLLLSQLCFLASVALLLWSLSSL

SEQ ID NO: 27118 - protein, 35 aa, Artificial Sequence
  Quasi-synthetic sequence derived from human genome
KRFKVMKPKVLRSWCRQILKGLLFLHTRTPPIIHR

SEQ ID NO: 27119 - protein, 35 aa, Artificial Sequence
  Quasi-synthetic sequence derived from human genome
RIPLLRKPWFQLGHSMNPRARKNRSRIPLLRKRRF

SEQ ID NO: 27120 - protein, 35 aa, Artificial Sequence
  Quasi-synthetic sequence derived from human genome
ILRIIRLVRVFRIFKLSRHSKGLQILGHTLRASMR

SEQ ID NO: 27121 - protein, 35 aa, Artificial Sequence
  Quasi-synthetic sequence derived from human genome
KKKDIRRGIGYLKLICFLIPFLLSLKKKMKVPYLS

SEQ ID NO: 27122 - protein, 35 aa, Artificial Sequence
  Quasi-synthetic sequence derived from human genome
IILALVLLVVLLVVCGPLAYKKLVKKFRQKKQRQW

SEQ ID NO: 27123 - protein, 35 aa, Artificial Sequence
  Quasi-synthetic sequence derived from human genome
MVVVMKFFRWVRRAWQRIISWVFFWRQKIKPTISG

SEQ ID NO: 27124 - protein, 35 aa, Artificial Sequence
  Quasi-synthetic sequence derived from human genome
KLLKRLRLLPALLILRAFKPHRKIRDYRVVVVGTA

SEQ ID NO: 27125 - protein, 35 aa, Artificial Sequence
  Quasi-synthetic sequence derived from human genome
CLKLLLPGLLLLLVVIILILAFWVLPKYKTRKAMR

SEQ ID NO: 27126 - protein, 35 aa, Artificial Sequence
  Quasi-synthetic sequence derived from human genome
LRLRHLRRPRVARLLCLGVWALILVFAVPAARVHR

SEQ ID NO: 27127 - protein, 35 aa, Artificial Sequence
  Quasi-synthetic sequence derived from human genome
QKLLLFYILGTVVAILLLLALALGLLVYRKRRAKR

SEQ ID NO: 27128 - protein, 35 aa, Artificial Sequence
  Quasi-synthetic sequence derived from human genome
ARTRAGAARVARWRRLRLQQLRRLRGLLRVLRGRP

SEQ ID NO: 27129 - protein, 35 aa, Artificial Sequence
  Quasi-synthetic sequence derived from human genome
LPRRRGRPSRRFLGKKYRKYYYKSPKPLLRPFLCR

SEQ ID NO: 27130 - protein, 35 aa, Artificial Sequence
  Quasi-synthetic sequence derived from human genome
IQRALRAPRKKIHRRVLKKNPLKNLRIMLKLNPYA

SEQ ID NO: 27131 - protein, 35 aa, Artificial Sequence
  Quasi-synthetic sequence derived from human genome
VLRLLRALRVLYVMRLARHSLGLRSLGLTMRRCAR

SEQ ID NO: 27132 - protein, 35 aa, Artificial Sequence
  Quasi-synthetic sequence derived from human genome
RRRRAMRAFRMLLYSKSTSLTFHWKLWGRHRGRRR

SEQ ID NO: 27133 - protein, 35 aa, Artificial Sequence
  Quasi-synthetic sequence derived from human genome
VVKILRVLRVLRPLRAINRAKGLKHVVQCVFVAIR

SEQ ID NO: 27134 - protein, 35 aa, Artificial Sequence
  Quasi-synthetic sequence derived from human genome
FKAKNIKKKKVSIMVSVDGVKVILKKKKKLLLLQK

SEQ ID NO: 27135 - protein, 35 aa, Artificial Sequence
  Quasi-synthetic sequence derived from human genome
LLLWKNWTLRKRQKIRFVVELVWPLSLFLVLIWLR

SEQ ID NO: 27136 - protein, 35 aa, Artificial Sequence
  Quasi-synthetic sequence derived from human genome
GGLSVLRTFRLLRVLKLVRFMPALRRQLVVLMKTM

SEQ ID NO: 27137 - protein, 35 aa, Artificial Sequence
  Quasi-synthetic sequence derived from human genome
RVSVRTWWRWLTFWRRLQSAFLKNRSLRTKSSLWR

SEQ ID NO: 27138 - protein, 35 aa, Artificial Sequence
  Quasi-synthetic sequence derived from human genome
KVALFAAVGAGCVIFLLIIIFLTVLLLKLRKRHRK

SEQ ID NO: 27139 - protein, 35 aa, Artificial Sequence
  Quasi-synthetic sequence derived from human genome
KIKTFLSLVWKRRILFFVVTLVSVFLVWKFTYAHK

SEQ ID NO: 27140 - protein, 35 aa, Artificial Sequence
  Quasi-synthetic sequence derived from human genome
WGMLRIPRPLIMIRAFRIYFRFELPRTRITNILKR

SEQ ID NO: 27141 - protein, 35 aa, Artificial Sequence
  Quasi-synthetic sequence derived from human genome
RLKIRKCMGRLHLRCPVFMSFLPLPNRLKAYVLYK

SEQ ID NO: 27142 - protein, 35 aa, Artificial Sequence
  Quasi-synthetic sequence derived from human genome
LKTYLKRFKVMKIKVLRSWCRQILKGLQFLHTRTP

SEQ ID NO: 27143 - protein, 35 aa, Artificial Sequence
  Quasi-synthetic sequence derived from human genome
FILILGNKKLKQIFLSVLRHVRYWVKDRSLRLHRF

SEQ ID NO: 27144 - protein, 35 aa, Artificial Sequence
  Quasi-synthetic sequence derived from human genome
LRRVTRNLVRNKLAVITRLLQNLIMGLFLLFFVLR

SEQ ID NO: 27145 - protein, 35 aa, Artificial Sequence
  Quasi-synthetic sequence derived from human genome
KTMKFIVWRRFKWVIIGLLFLLILLLFVAVLLYSL

SEQ ID NO: 27146 - protein, 35 aa, Artificial Sequence
  Quasi-synthetic sequence derived from human genome
RASFKRARRPGARALRLVLGIVLLFWACFLPFWLW

SEQ ID NO: 27147 - protein, 35 aa, Artificial Sequence
  Quasi-synthetic sequence derived from human genome
IRTPILMTILINFLIFIRILGILLSKLRTRQMRCR

SEQ ID NO: 27148 - protein, 35 aa, Artificial Sequence
  Quasi-synthetic sequence derived from human genome
MRRKLKFFFMNPCEKFWARGRKPWKLAIQILKIAM

SEQ ID NO: 27149 - protein, 35 aa, Artificial Sequence
  Quasi-synthetic sequence derived from human genome
FFSTLVLLLSIAIFQRQKRRKFWKAKNLQHIPLKK

SEQ ID NO: 27150 - protein, 35 aa, Artificial Sequence
  Quasi-synthetic sequence derived from human genome
AIKLEAHWRGALARKAIQRRKWAVRIIRKFIKGFI

SEQ ID NO: 27151 - protein, 35 aa, Artificial Sequence
  Quasi-synthetic sequence derived from human genome
MLYSRAVRNLKKKLLPWQRRGLLRAQGLRGWKARR

SEQ ID NO: 27152 - protein, 35 aa, Artificial Sequence
  Quasi-synthetic sequence derived from human genome
ALLFLCLLPLIVKHIRKKQAKKAAAIRAKKSSKVR

SEQ ID NO: 27153 - protein, 35 aa, Artificial Sequence
  Quasi-synthetic sequence derived from human genome
FAIYHQSLFRILKVFKSLRALRAIRVLRRLSFLTS

SEQ ID NO: 27154 - protein, 35 aa, Artificial Sequence
  Quasi-synthetic sequence derived from human genome
LLLWVKQRKDLLHLCCKKLKILGMPFRNIRSILKM

SEQ ID NO: 27155 - protein, 35 aa, Artificial Sequence
  Quasi-synthetic sequence derived from human genome
KQIRARRKTARMLMIVLLVFAICYLPISILNVLKR

SEQ ID NO: 27156 - protein, 35 aa, Artificial Sequence
  Quasi-synthetic sequence derived from human genome
AIRLSLIMQLVALLLVVLWIRWKCRRLRIREAWLL

SEQ ID NO: 27157 - protein, 35 aa, Artificial Sequence
  Quasi-synthetic sequence derived from human genome
NKKHLILAFCAGVLLTLLLIAFIFLIIKSYRKYRR

SEQ ID NO: 27158 - protein, 35 aa, Artificial Sequence
  Quasi-synthetic sequence derived from human genome
RLLRGLWQRWRRYKYRFVPWIALNLSHNPRTLRYV

SEQ ID NO: 27159 - protein, 35 aa, Artificial Sequence
  Quasi-synthetic sequence derived from human genome
LKKRSKQPLGEVKRRLSLYLTKIHFWLPVLKMIRK

SEQ ID NO: 27160 - protein, 35 aa, Artificial Sequence
  Quasi-synthetic sequence derived from human genome
ILRIIRLVRVFRIFKLSRHSKGLQILGQTLKASMR

SEQ ID NO: 27161 - protein, 35 aa, Artificial Sequence
  Quasi-synthetic sequence derived from human genome
KVTWMRRMRILRRLLRRYRESKKIDRHMYHSLYLK

SEQ ID NO: 27162 - protein, 35 aa, Artificial Sequence
  Quasi-synthetic sequence derived from human genome
RKYKKNIKALYIVHPTMFIKTLLILFKPLISFKFG

SEQ ID NO: 27163 - protein, 35 aa, Artificial Sequence
  Quasi-synthetic sequence derived from human genome
LLLPKGVVLKLKPVATRFPRKAWRQKRSSVLKPLL

SEQ ID NO: 27164 - protein, 35 aa, Artificial Sequence
  Quasi-synthetic sequence derived from human genome
LRRRLKYFFMSPCDKFRAKGRKPCKLMLQVVKILV

SEQ ID NO: 27165 - protein, 35 aa, Artificial Sequence
  Quasi-synthetic sequence derived from human genome
VTLFVKRLRRKTYLSNMAKTMRMVLKSKRRVSVLK

SEQ ID NO: 27166 - protein, 35 aa, Artificial Sequence
  Quasi-synthetic sequence derived from human genome
KTARLFSKKIFCCLFFITLFFIRLLSYMFFHVRFI

SEQ ID NO: 27167 - protein, 35 aa, Artificial Sequence
  Quasi-synthetic sequence derived from human genome
RRRPALGWLARLLRSRAGSRKRPLTLLQRAGLLLL

SEQ ID NO: 27168 - protein, 35 aa, Artificial Sequence
  Quasi-synthetic sequence derived from human genome
IVKQGYVKIRSRKLGIFRRCWLVFKKASSKGPRRL

SEQ ID NO: 27169 - protein, 35 aa, Artificial Sequence
  Quasi-synthetic sequence derived from human genome
RCYRLAVRTVIRAFVKCTKARYLKKKNMRTLWINR

SEQ ID NO: 27170 - protein, 35 aa, Artificial Sequence
  Quasi-synthetic sequence derived from human genome
LLVAGVLVLLVSLGVAIHLCCRRRRARLRFMKQLR

SEQ ID NO: 27171 - protein, 35 aa, Artificial Sequence
  Quasi-synthetic sequence derived from human genome
SKAAKDVLGFLRVVRFVRILRIFKLTRHFVGLRVL

SEQ ID NO: 27172 - protein, 35 aa, Artificial Sequence
  Quasi-synthetic sequence derived from human genome
YWKTWIFWKTWIFWKTWIFRKTYIGWKTWIFSGRC

SEQ ID NO: 27173 - protein, 35 aa, Artificial Sequence
  Quasi-synthetic sequence derived from human genome
FIFYLLASVLLSLLLILKAGRRWNKYFKSRRPLFT

SEQ ID NO: 27174 - protein, 35 aa, Artificial Sequence
  Quasi-synthetic sequence derived from human genome
RPKRLLLVLVSAFFIFWSPFNVVLLVHLWRRVMLK

SEQ ID NO: 27175 - protein, 35 aa, Artificial Sequence
  Quasi-synthetic sequence derived from human genome
RRLRKNLKSLIIVHPSWFIRTVLAISRPFISVKFI

SEQ ID NO: 27176 - protein, 35 aa, Artificial Sequence
  Quasi-synthetic sequence derived from human genome
PVFRLARRRKKILFYCHFPDLLLTKRDSFLKRLYR

SEQ ID NO: 27177 - protein, 35 aa, Artificial Sequence
  Quasi-synthetic sequence derived from human genome
WFRSWGYVLLIVLFCLFIFVLIYVRVFRKSRRSLN

SEQ ID NO: 27178 - protein, 35 aa, Artificial Sequence
  Quasi-synthetic sequence derived from human genome
KVGQVLRVMRLMRIFRILKLARHSTGLRAFGFTLR

SEQ ID NO: 27179 - protein, 35 aa, Artificial Sequence
  Quasi-synthetic sequence derived from human genome
IRRKTKDAFYKNIVKKGYLLKKGKGKRWKNLYFIL

SEQ ID NO: 27180 - protein, 35 aa, Artificial Sequence
  Quasi-synthetic sequence derived from human genome
VLQKRSWPFLRSFRVLRVFKLAKSWPTLNTLIKII

SEQ ID NO: 27181 - protein, 35 aa, Artificial Sequence
  Quasi-synthetic sequence derived from human genome
LWRRQIYAVATLRFLKLRRERRALLCLLLVLGIAF

SEQ ID NO: 27182 - protein, 35 aa, Artificial Sequence
  Quasi-synthetic sequence derived from human genome
LLVHSLNLLAKQGLRLLRGLRRRNVQKKVALAKKL

SEQ ID NO: 27183 - protein, 35 aa, Artificial Sequence
  Quasi-synthetic sequence derived from human genome
LLSKAKQKLLRHLVPAAALRRKRKALWAHLFSSLR

SEQ ID NO: 27184 - protein, 35 aa, Artificial Sequence
  Quasi-synthetic sequence derived from human genome
RLPVKKIRKQMKLLLLLLLLSCAAWLTYVHLGLVR

SEQ ID NO: 27185 - protein, 35 aa, Artificial Sequence
  Quasi-synthetic sequence derived from human genome
SRRRGFGLFFFLRLHRLLLLFLVLRGTLANKLNVP

SEQ ID NO: 27186 - protein, 35 aa, Artificial Sequence
  Quasi-synthetic sequence derived from human genome
RLRRVIAAFYFPKREKKRILFLYNDLLKKRAAFTK

SEQ ID NO: 27187 - protein, 35 aa, Artificial Sequence
  Quasi-synthetic sequence derived from human genome
VMGKLRYLSLLCLLPLVAFLLFCLHVLFKKRTKSK

SEQ ID NO: 27188 - protein, 35 aa, Artificial Sequence
  Quasi-synthetic sequence derived from human genome
KLRIRTKAAVKIQAWWRGTLVRRTLLHAALRAWII

SEQ ID NO: 27189 - protein, 35 aa, Artificial Sequence
  Quasi-synthetic sequence derived from human genome
LLRIANFSNLIFLRIKRRVKSVVLVILLGPLLFLV

SEQ ID NO: 27190 - protein, 35 aa, Artificial Sequence
  Quasi-synthetic sequence derived from human genome
RRRNTPFHERFFRFLLRKLYVFRRSFLMTCISLRN

SEQ ID NO: 27191 - protein, 35 aa, Artificial Sequence
  Quasi-synthetic sequence derived from human genome
LTRKRIRYRFRRFIQQFSQCKATARNLKLKYLINL

SEQ ID NO: 27192 - protein, 35 aa, Artificial Sequence
  Quasi-synthetic sequence derived from human genome
VGVGLCLRLLLFFRFKRTLDRICVLFLLGWHRKPR

SEQ ID NO: 27193 - protein, 35 aa, Artificial Sequence
  Quasi-synthetic sequence derived from human genome
IILVNLIHLFIFRKSNFIFDKLHKVGIKTRRQWRR

SEQ ID NO: 27194 - protein, 35 aa, Artificial Sequence
  Quasi-synthetic sequence derived from human genome
ILRVIRLVRVFRIFKLSRHSKGLQILGQTLRASMR

SEQ ID NO: 27195 - protein, 35 aa, Artificial Sequence
  Quasi-synthetic sequence derived from human genome
LVKRKRTKGKKLLLSIGVLLHKWKNVCIVLTALNF

SEQ ID NO: 27196 - protein, 35 aa, Artificial Sequence
  Quasi-synthetic sequence derived from human genome
CRCRGRKRCIKKFSIQRFPKILVLHLKRFSESRIR

SEQ ID NO: 27197 - protein, 35 aa, Artificial Sequence
  Quasi-synthetic sequence derived from human genome
KRRPKRREIPLKVLVKAVLFACMLMRKTMASRVRV

SEQ ID NO: 27198 - protein, 35 aa, Artificial Sequence
  Quasi-synthetic sequence derived from human genome
LKSLQSYFSPTLFRVIRLARIGRILRLIRAAKGIR

SEQ ID NO: 27199 - protein, 35 aa, Artificial Sequence
  Quasi-synthetic sequence derived from human genome
PILKRALKVKQAMMQLYVLKLLKVQTKYLGRQWRK

SEQ ID NO: 27200 - protein, 35 aa, Artificial Sequence
  Quasi-synthetic sequence derived from human genome
VVGILLVVVLGVVFGILIKRRQQKIRKYTMRRLLQ

SEQ ID NO: 27201 - protein, 35 aa, Artificial Sequence
  Quasi-synthetic sequence derived from human genome
ALLWRGRIPGRQWIGKHRRPRFVSLRAKQNMIRRL

SEQ ID NO: 27202 - protein, 35 aa, Artificial Sequence
  Quasi-synthetic sequence derived from human genome
LLRKHRFQLYRSMNSRARKNRSQIVLFQKRRFHFF

SEQ ID NO: 27203 - protein, 35 aa, Artificial Sequence
  Quasi-synthetic sequence derived from human genome
YLEKLRADKLRAACIRIQKTIRGWLLRKKYLRMRK

SEQ ID NO: 27204 - protein, 35 aa, Artificial Sequence
  Quasi-synthetic sequence derived from human genome
LHRRLRGLRRAAAGTSRLLFQRLLPCGVIKFRYIW

SEQ ID NO: 27205 - protein, 35 aa, Artificial Sequence
  Quasi-synthetic sequence derived from human genome
HRVRVLSVARPGLWLYTHPLIKLLFLPRRSRCKFF

SEQ ID NO: 27206 - protein, 35 aa, Artificial Sequence
  Quasi-synthetic sequence derived from human genome
KRMRVKKLPMILALHLKRFKYMEQLHRYTKLSYRV

SEQ ID NO: 27207 - protein, 35 aa, Artificial Sequence
  Quasi-synthetic sequence derived from human genome
MAKLWFKFQRYFRRKPVRFFTFLALYLTAGSLVFL

SEQ ID NO: 27208 - protein, 35 aa, Artificial Sequence
  Quasi-synthetic sequence derived from human genome
ILRVIRLVRVFRIFKLSRHSKGLQILGQTLKASMR

SEQ ID NO: 27209 - protein, 35 aa, Artificial Sequence
  Quasi-synthetic sequence derived from human genome
ILRVIRLVRVFRIFKLSRHSKGLQILGKTLQASMR

SEQ ID NO: 27210 - protein, 35 aa, Artificial Sequence
  Quasi-synthetic sequence derived from human genome
KTRRWRGLGSLFRRACCVALPLQLLLLLFLLLLFL

SEQ ID NO: 27211 - protein, 35 aa, Artificial Sequence
  Quasi-synthetic sequence derived from human genome
RILKVLLWLLAILTGLIAGKFLFHQRLFGQLLRLK

SEQ ID NO: 27212 - protein, 35 aa, Artificial Sequence
  Quasi-synthetic sequence derived from human genome
RKLHQQYRLARQRIIQFQARCRAYLVRKAFRHRLW

SEQ ID NO: 27213 - protein, 35 aa, Artificial Sequence
  Quasi-synthetic sequence derived from human genome
FHRWKVVLLVRTDKRSDSLIRKKFRMMKIPKPILF

SEQ ID NO: 27214 - protein, 35 aa, Artificial Sequence
  Quasi-synthetic sequence derived from human genome
KLSRALRYYYNKRILHKTKGKRFTYKFNFNKLVLV

SEQ ID NO: 27215 - protein, 35 aa, Artificial Sequence
  Quasi-synthetic sequence derived from human genome
HVRIRVIKKKKVIMKKRKKLTLTRPTPLVTAGPLV

SEQ ID NO: 27216 - protein, 35 aa, Artificial Sequence
  Quasi-synthetic sequence derived from human genome
FRPGKVLRFLRLFGPGKNVPSVWRSARRKRKKKHR

SEQ ID NO: 27217 - protein, 35 aa, Artificial Sequence
  Quasi-synthetic sequence derived from human genome
RRGWRRAPLRRGVGSSPRARRLMRPLWLLLAVGVF

SEQ ID NO: 27218 - protein, 35 aa, Artificial Sequence
  Quasi-synthetic sequence derived from human genome
SKAERKITSRPFTRFRTAVRVVIAILRLRFLVKKW

SEQ ID NO: 27219 - protein, 35 aa, Artificial Sequence
  Quasi-synthetic sequence derived from human genome
KRMKVKKLPMILALHLKRFKYMDQLHRYTKLSYRV

SEQ ID NO: 27220 - protein, 35 aa, Artificial Sequence
  Quasi-synthetic sequence derived from human genome
RWLLRTKRLHWSRLLFLLGMLIIGSTYQHLRRPRG

SEQ ID NO: 27221 - protein, 35 aa, Artificial Sequence
  Quasi-synthetic sequence derived from human genome
IWVKMYGYFAGLCRRLQKFWRVTVKGFFVKKKEKK

SEQ ID NO: 27222 - protein, 35 aa, Artificial Sequence
  Quasi-synthetic sequence derived from human genome
WWRGTLGRRKAAKRKWAAQTIRRLIRGFVLRHAPR

SEQ ID NO: 27223 - protein, 35 aa, Artificial Sequence
  Quasi-synthetic sequence derived from human genome
IFKKKAHKLTSAPLKQNFQKLLKLFYIKKLKPLYN

SEQ ID NO: 27224 - protein, 35 aa, Artificial Sequence
  Quasi-synthetic sequence derived from human genome
LFISVAFKLLILLLGSWALFFRRPKASLPRVFVLR

SEQ ID NO: 27225 - protein, 35 aa, Artificial Sequence
  Quasi-synthetic sequence derived from human genome
YIQAIFRGKKARRHLKMMHIAATLIQRRFRTLMMR

SEQ ID NO: 27226 - protein, 35 aa, Artificial Sequence
  Quasi-synthetic sequence derived from human genome
MPFVPAVAKSIPRKRISLKRPKKCFRNLFHIRRNK

SEQ ID NO: 27227 - protein, 35 aa, Artificial Sequence
  Quasi-synthetic sequence derived from human genome
KGIQCFLVVVALLCVPWMLLFKPLVLRRQYLRRKH

SEQ ID NO: 27228 - protein, 35 aa, Artificial Sequence
  Quasi-synthetic sequence derived from human genome
WLRRKLRGKRRPVIAFCLLMILSAMAVTRFPPQRP

SEQ ID NO: 27229 - protein, 35 aa, Artificial Sequence
  Quasi-synthetic sequence derived from human genome
GKMCICFSFCLWFVLQVLIVVLRIVRYRKSSKLIK

SEQ ID NO: 27230 - protein, 35 aa, Artificial Sequence
  Quasi-synthetic sequence derived from human genome
LLKIANFSNLIFLRLKRRVKSVILVVLLGPLLFLA

SEQ ID NO: 27231 - protein, 35 aa, Artificial Sequence
  Quasi-synthetic sequence derived from human genome
KKLFVVTAVSAISVIFLAHHFKRKRGKKKGKILPW

SEQ ID NO: 27232 - protein, 35 aa, Artificial Sequence
  Quasi-synthetic sequence derived from human genome
FLALQSLRFGFGFRRGRSFLLRSWHHLMKRVQIKI

SEQ ID NO: 27233 - protein, 35 aa, Artificial Sequence
  Quasi-synthetic sequence derived from human genome
RRRPARTLGLLLLVVLGFLVLRRLDWSTLVPLRLR

SEQ ID NO: 27234 - protein, 35 aa, Artificial Sequence
  Quasi-synthetic sequence derived from human genome
LLVYKDKLRINRFPWPKVLKISYKRSSFFIKIRPG

SEQ ID NO: 27235 - protein, 35 aa, Artificial Sequence
  Quasi-synthetic sequence derived from human genome
RALALFVITCLVIFVLVHSFLKKLLGKKLTRCLKP

SEQ ID NO: 27236 - protein, 35 aa, Artificial Sequence
  Quasi-synthetic sequence derived from human genome
RIRILCCLTFLVKVKSKALLKNRLLPPLLHTLFPI

SEQ ID NO: 27237 - protein, 35 aa, Artificial Sequence
  Quasi-synthetic sequence derived from human genome
WRRYSTRQRFLKLKYYSIILQSRIRMIIAVTSYKR

SEQ ID NO: 27238 - protein, 35 aa, Artificial Sequence
  Quasi-synthetic sequence derived from human genome
RLKKHRWYKKILKSRDPIIFSVGWRRFQTIPLYYI

SEQ ID NO: 27239 - protein, 35 aa, Artificial Sequence
  Quasi-synthetic sequence derived from human genome
VIKLKNKIKYRAEACIKMQKTIRMWLCKRRHKPRI

SEQ ID NO: 27240 - protein, 35 aa, Artificial Sequence
  Quasi-synthetic sequence derived from human genome
LFRRFGRQRKIGGRGRIISPYRTPVLRRHRYSIFR

SEQ ID NO: 27241 - protein, 35 aa, Artificial Sequence
  Quasi-synthetic sequence derived from human genome
LQMVLQRRKFLQMKRRKYGFIYKTHLFGRPTVRVM

SEQ ID NO: 27242 - protein, 35 aa, Artificial Sequence
  Quasi-synthetic sequence derived from human genome
RILINLMKYLQKWKRYRPLWKLDKAIVMEKFAAKK

SEQ ID NO: 27243 - protein, 35 aa, Artificial Sequence
  Quasi-synthetic sequence derived from human genome
GLLVFFFLIVPLIVCAIFIFIKRDQLWRSYFRKKR

SEQ ID NO: 27244 - protein, 35 aa, Artificial Sequence
  Quasi-synthetic sequence derived from human genome
AGIPKAKQRLKRLRNIHYLFNTALFLIAWRLLIAR

SEQ ID NO: 27245 - protein, 35 aa, Artificial Sequence
  Quasi-synthetic sequence derived from human genome
IFGLLLLVLFILFLTWCRVQKQKHLPLRVSTRRRG

SEQ ID NO: 27246 - protein, 35 aa, Artificial Sequence
  Quasi-synthetic sequence derived from human genome
RILHISVMGGMIALLLSILCLVMILYTRRRWCKRR

SEQ ID NO: 27247 - protein, 35 aa, Artificial Sequence
  Quasi-synthetic sequence derived from human genome
GRLQHGNMRKNMRVLSRISKFRRLRQLLRRRKKTR

SEQ ID NO: 27248 - protein, 35 aa, Artificial Sequence
  Quasi-synthetic sequence derived from human genome
ALRPLVKPKIVKKRTKKFIRHQSDRYVKIKRNWRK

SEQ ID NO: 27249 - protein, 35 aa, Artificial Sequence
  Quasi-synthetic sequence derived from human genome
RLPIRMAKALGKRTAKYRWFAVLYLLVCFLLLPSL

SEQ ID NO: 27250 - protein, 35 aa, Artificial Sequence
  Quasi-synthetic sequence derived from human genome
TNKGRDIKTIKSLRVLRVLRPLKTIKRLPKLKAVF

SEQ ID NO: 27251 - protein, 35 aa, Artificial Sequence
  Quasi-synthetic sequence derived from human genome
VARKFLYLWIRMTFGRVFPSKARFYYEQRLLRKVF

SEQ ID NO: 27252 - protein, 35 aa, Artificial Sequence
  Quasi-synthetic sequence derived from human genome
TRSGHVLYSGWLRKSPPEKKLRLFAWRKRWFILRR

SEQ ID NO: 27253 - protein, 35 aa, Artificial Sequence
  Quasi-synthetic sequence derived from human genome
LKTYLKRFKVMKPKVLRSWCRQILKGLQFLHTRTP

SEQ ID NO: 27254 - protein, 35 aa, Artificial Sequence
  Quasi-synthetic sequence derived from human genome
KLKLFRHYYVLIVCYIYFTRIIAFLLKLAVPFQWK

SEQ ID NO: 27255 - protein, 35 aa, Artificial Sequence
  Quasi-synthetic sequence derived from human genome
YKTFLPKCIRAKIQDYHILTRKRIRYRFRRFIQQF

SEQ ID NO: 27256 - protein, 35 aa, Artificial Sequence
  Quasi-synthetic sequence derived from human genome
WITAVLPTVIICVMVFCLILWKWKKKKRPRNSYKC

SEQ ID NO: 27257 - protein, 35 aa, Artificial Sequence
  Quasi-synthetic sequence derived from human genome
WFQFYLTFPLIFGLFIILLVIFLIWRCFLRNKTRR

SEQ ID NO: 27258 - protein, 35 aa, Artificial Sequence
  Quasi-synthetic sequence derived from human genome
FLLILLTGVLCHRFHGLWYMKMMWAWLQAKRKPRK

SEQ ID NO: 27259 - protein, 35 aa, Artificial Sequence
  Quasi-synthetic sequence derived from human genome
VVLMLIILVALLMLVFRSKREVKRQKYRLSQLYKW

SEQ ID NO: 27260 - protein, 35 aa, Artificial Sequence
  Quasi-synthetic sequence derived from human genome
REHVLNLAALTLQRCLRGFFIKRRFRSLRHKIILL

SEQ ID NO: 27261 - protein, 35 aa, Artificial Sequence
  Quasi-synthetic sequence derived from human genome
QKLLKYYVLNALKHRPPKAQKKRYLFRSFKATKFF

SEQ ID NO: 27262 - protein, 35 aa, Artificial Sequence
  Quasi-synthetic sequence derived from human genome
IPKKFQLNQHRRIKLSPLMMYEKLSMIRFRYRILR

SEQ ID NO: 27263 - protein, 35 aa, Artificial Sequence
  Quasi-synthetic sequence derived from human genome
AAKLKRKYWWKNLKMMIILGVICAIILIIIIVYFS

SEQ ID NO: 27264 - protein, 35 aa, Artificial Sequence
  Quasi-synthetic sequence derived from human genome
ALIAIAIVAVLLVLTCCFCICKKCLFKKKNKKKGK

SEQ ID NO: 27265 - protein, 35 aa, Artificial Sequence
  Quasi-synthetic sequence derived from human genome
TILAALALLVLILLCLLIYYCRRRCLKPRQQHRKL

SEQ ID NO: 27266 - protein, 35 aa, Artificial Sequence
  Quasi-synthetic sequence derived from human genome
FYLSLFFWMLFKALLIIYGILVIFRRMMKSRMMVI

SEQ ID NO: 27267 - protein, 35 aa, Artificial Sequence
  Quasi-synthetic sequence derived from human genome
TVYNPVIYVFMIRKFRRSLLQLLCLRLLRCQRPAK

SEQ ID NO: 27268 - protein, 35 aa, Artificial Sequence
  Quasi-synthetic sequence derived from human genome
KKFLYIKSVFHTLRMAQRRHKRVRTWTRHINIFNK

SEQ ID NO: 27269 - protein, 35 aa, Artificial Sequence
  Quasi-synthetic sequence derived from human genome
RKAPLWLRAKFQRLLFKLGCYIQKNCGKFLVVGLL

SEQ ID NO: 27270 - protein, 35 aa, Artificial Sequence
  Quasi-synthetic sequence derived from human genome
KFYIHAIGIGKCKRRIVKCGKLHKKGRKLCVYAFK

SEQ ID NO: 27271 - protein, 35 aa, Artificial Sequence
  Quasi-synthetic sequence derived from human genome
SFRNLRLPKRLRVVYFLARTRLAQRLIMAGTVVWI

SEQ ID NO: 27272 - protein, 35 aa, Artificial Sequence
  Quasi-synthetic sequence derived from human genome
RMHKELRKYIYIRSCVVIIQKRFRCFQAQKLYKRR

SEQ ID NO: 27273 - protein, 35 aa, Artificial Sequence
  Quasi-synthetic sequence derived from human genome
MALSTIVSQRKQIKRKAPRGFLKRVFKRKKPQLRL

SEQ ID NO: 27274 - protein, 35 aa, Artificial Sequence
  Quasi-synthetic sequence derived from human genome
AAKLKRKYWWKNCKMWAIGITVLVIFIIIIIVWVV

SEQ ID NO: 27275 - protein, 35 aa, Artificial Sequence
  Quasi-synthetic sequence derived from human genome
LLAVIVLVALLLLWRRRQKRRTGALVLSRGGKRNG

SEQ ID NO: 27276 - protein, 35 aa, Artificial Sequence
  Quasi-synthetic sequence derived from human genome
LIQAMWRRYRAKKYLCKVKAACKIQAWYRCWRAHK

SEQ ID NO: 27277 - protein, 35 aa, Artificial Sequence
  Quasi-synthetic sequence derived from human genome
LFLLQYFVPLGFILICYLKIVICLRRRNAKVDKKK

SEQ ID NO: 27278 - protein, 35 aa, Artificial Sequence
  Quasi-synthetic sequence derived from human genome
KVWRGTLARMRYKRTKAALTIIRYYRRYKVKSYIH

SEQ ID NO: 27279 - protein, 35 aa, Artificial Sequence
  Quasi-synthetic sequence derived from human genome
WKPSPLIKPFGARKKRSWYLTWKYKLTNQRALRRF

SEQ ID NO: 27280 - protein, 35 aa, Artificial Sequence
  Quasi-synthetic sequence derived from human genome
KALSSRRLFVRRGQPFTIILYFRAPVRAFLPALKK

SEQ ID NO: 27281 - protein, 35 aa, Artificial Sequence
  Quasi-synthetic sequence derived from human genome
KQMRARRKTAKMLMVVLLVFALCYLPISVLNVLKR

SEQ ID NO: 27282 - protein, 35 aa, Artificial Sequence
  Quasi-synthetic sequence derived from human genome
GILLLTLVSFLIFILFIIVQLFIMKLRKAHVIWKK

SEQ ID NO: 27283 - protein, 35 aa, Artificial Sequence
  Quasi-synthetic sequence derived from human genome
RNKVRHTKKKTFKCIKCSKSFFMLSCLIRHKRIHI

SEQ ID NO: 27284 - protein, 35 aa, Artificial Sequence
  Quasi-synthetic sequence derived from human genome
AAAAPRASGRCVIAPVRAVLRLRRRVCVLRKRRLL

SEQ ID NO: 27285 - protein, 35 aa, Artificial Sequence
  Quasi-synthetic sequence derived from human genome
RKLFIQRAKKIDKISRIGFPMAFLIFNMFYWIIYK

SEQ ID NO: 27286 - protein, 35 aa, Artificial Sequence
  Quasi-synthetic sequence derived from human genome
AFLPARQLWKWFGKPTQRRGMKGKARKLFYKAIVR

SEQ ID NO: 27287 - protein, 35 aa, Artificial Sequence
  Quasi-synthetic sequence derived from human genome
YLVRKQMRLQRKAVISLQSYFRMRKARQYYLKMYK

SEQ ID NO: 27288 - protein, 35 aa, Artificial Sequence
  Quasi-synthetic sequence derived from human genome
GRLQQGNMRKNVRVLSRTSKFRRLRQLLRRRKKRW

SEQ ID NO: 27289 - protein, 35 aa, Artificial Sequence
  Quasi-synthetic sequence derived from human genome
LRFKRTHIKMKKQPKGYGLRCHRAIITICRLIGIK

SEQ ID NO: 27290 - protein, 35 aa, Artificial Sequence
  Quasi-synthetic sequence derived from human genome
TQFFHVKVLNINLKRKFIKKRIIIISNYSKRNSLL

SEQ ID NO: 27291 - protein, 35 aa, Artificial Sequence
  Quasi-synthetic sequence derived from human genome
KLSRALRYYYNKRILHKTKGKRFTYKFNFSKVVLV

SEQ ID NO: 27292 - protein, 35 aa, Artificial Sequence
  Quasi-synthetic sequence derived from human genome
CRFRRAFVTVTHRLLLLCLGVVMVCVVLRYMKYRW

SEQ ID NO: 27293 - protein, 35 aa, Artificial Sequence
  Quasi-synthetic sequence derived from human genome
KFKLFTLVSACIPVFRLARRRKKILFYCHFPDLLL

SEQ ID NO: 27294 - protein, 35 aa, Artificial Sequence
  Quasi-synthetic sequence derived from human genome
KKKKIVKYGMGGLIILFLIAIIWFPLLFMSLVRSV

SEQ ID NO: 27295 - protein, 35 aa, Artificial Sequence
  Quasi-synthetic sequence derived from human genome
AAGVIGGLFILVIVGLTFAVYVRRKSIKKKRALRR

SEQ ID NO: 27296 - protein, 35 aa, Artificial Sequence
  Quasi-synthetic sequence derived from human genome
IFCLCSLVGILHLQRALVLRRKRKRMTDPTRRFFK

SEQ ID NO: 27297 - protein, 35 aa, Artificial Sequence
  Quasi-synthetic sequence derived from human genome
RVAKMGLILAIRSILLVIPFPFTLRRLKYCQKNLL

SEQ ID NO: 27298 - protein, 35 aa, Artificial Sequence
  Quasi-synthetic sequence derived from human genome
FFRILRIFKLIAPKLLQIIDKRMSHQKTFWYGILK

SEQ ID NO: 27299 - protein, 35 aa, Artificial Sequence
  Quasi-synthetic sequence derived from human genome
HMGVLVLRGNTKINTFNWAKIRKLSFKRKHFLIKL

SEQ ID NO: 27300 - protein, 35 aa, Artificial Sequence
  Quasi-synthetic sequence derived from human genome
FILPVLGAVLALLFLLLVLLLLVRKKRKIKEPLLL

SEQ ID NO: 27301 - protein, 35 aa, Artificial Sequence
  Quasi-synthetic sequence derived from human genome
VKHWWVRLLYRPYCKKNPQHLYSFIAKILWRSAKK

SEQ ID NO: 27302 - protein, 35 aa, Artificial Sequence
  Quasi-synthetic sequence derived from human genome
RRRKSLWLALSASWLLLVLLGGFSLLRLALPPRPR

SEQ ID NO: 27303 - protein, 35 aa, Artificial Sequence
  Quasi-synthetic sequence derived from human genome
LILLATAVILGSAVLLFHFCIFHRRKMKAIRRSLK

SEQ ID NO: 27304 - protein, 35 aa, Artificial Sequence
  Quasi-synthetic sequence derived from human genome
RLIILIRIFHLLHQKRQLEKLMRRLVSENKRRYTR

SEQ ID NO: 27305 - protein, 35 aa, Artificial Sequence
  Quasi-synthetic sequence derived from human genome
LVVTLFCYCRISRRLRRPPHVGRARRNSLRIIFAI

SEQ ID NO: 27306 - protein, 35 aa, Artificial Sequence
  Quasi-synthetic sequence derived from human genome
IRLARIGRILRLIRGAKGIRTLLFALMMSLPALFN

SEQ ID NO: 27307 - protein, 35 aa, Artificial Sequence
  Quasi-synthetic sequence derived from human genome
RVLRSLKLLAQFRQIQIIILVLVRALKSMTFLLML

SEQ ID NO: 27308 - protein, 35 aa, Artificial Sequence
  Quasi-synthetic sequence derived from human genome
LKVFYKFLNSNRPKIRHTEKKSFKCKKRVKLFCML

SEQ ID NO: 27309 - protein, 35 aa, Artificial Sequence
  Quasi-synthetic sequence derived from human genome
RLDAEVYKTARALRIVRFTKILSLLRLLRLSRLIR

SEQ ID NO: 27310 - protein, 35 aa, Artificial Sequence
  Quasi-synthetic sequence derived from human genome
KLLFTPQHKMLRLRLPNLKMVRLRVSFSAVVFKAV

SEQ ID NO: 27311 - protein, 35 aa, Artificial Sequence
  Quasi-synthetic sequence derived from human genome
LSIMSKFKLLSSLPHWRRIAQKIIREPRKKRVPKK

SEQ ID NO: 27312 - protein, 35 aa, Artificial Sequence
  Quasi-synthetic sequence derived from human genome
YLARRRIRLWHRGAMVIQATWRGYRVRRNLAHLCR

SEQ ID NO: 27313 - protein, 35 aa, Artificial Sequence
  Quasi-synthetic sequence derived from human genome
AWLRRRYLRLRYEDLVRQPRAQLRRLLRFSGLRAL

SEQ ID NO: 27314 - protein, 35 aa, Artificial Sequence
  Quasi-synthetic sequence derived from human genome
RFQQFLFAFFIFIMSLLLISGQRPVNLTMRRKLRK

SEQ ID NO: 27315 - protein, 35 aa, Artificial Sequence
  Quasi-synthetic sequence derived from human genome
RKRRADMPRVFVFRALLLVLIFLFVVSYWLFYGVR

SEQ ID NO: 27316 - protein, 35 aa, Artificial Sequence
  Quasi-synthetic sequence derived from human genome
LFAKSNTVYNPVIYVFMIRKFRRSLLQLLCLRLLR

SEQ ID NO: 27317 - protein, 35 aa, Artificial Sequence
  Quasi-synthetic sequence derived from human genome
LFWVILVLVVVVGSSAFLLCHRRACRKRIRQKLHL

SEQ ID NO: 27318 - protein, 35 aa, Artificial Sequence
  Quasi-synthetic sequence derived from human genome
LMMLVCGLVWVPIIKKKQKHRQKSNFLRSLKSFFL

SEQ ID NO: 27319 - protein, 35 aa, Artificial Sequence
  Quasi-synthetic sequence derived from human genome
KLSGRLGLLGRRGFSGRLGGYWKTWIFWKTWIFWK

SEQ ID NO: 27320 - protein, 35 aa, Artificial Sequence
  Quasi-synthetic sequence derived from human genome
LYKRYGGFLRRIRPKLKWDNQKRYGGFLRRQFKVV

SEQ ID NO: 27321 - protein, 35 aa, Artificial Sequence
  Quasi-synthetic sequence derived from human genome
PWRVIGYHVVVWMMAGIPLLLFRWKPLWGVRLRLR

SEQ ID NO: 27322 - protein, 35 aa, Artificial Sequence
  Quasi-synthetic sequence derived from human genome
FAFVLLLSGALAYCLALQLYVRRRKKLPSVLLFKK

SEQ ID NO: 27323 - protein, 35 aa, Artificial Sequence
  Quasi-synthetic sequence derived from human genome
RLCKLLFFRIRPIFVFDGDAPLLKKQTLVKRRQRK

SEQ ID NO: 27324 - protein, 35 aa, Artificial Sequence
  Quasi-synthetic sequence derived from human genome
WLAIILLIFISLFPEILLIVLKNVRRRSARVTKRL

SEQ ID NO: 27325 - protein, 35 aa, Artificial Sequence
  Quasi-synthetic sequence derived from human genome
VLALVLPSIVILGKIILFLPCISRKLKRIKKGWEK

SEQ ID NO: 27326 - protein, 35 aa, Artificial Sequence
  Quasi-synthetic sequence derived from human genome
IRLARIGRILRLIKGAKGIRTLLFALMMSLPALFN

SEQ ID NO: 27327 - protein, 35 aa, Artificial Sequence
  Quasi-synthetic sequence derived from human genome
IIRKYISKYSVFLRHRYQSRSAFLGRYLKKKKSVV

SEQ ID NO: 27328 - protein, 35 aa, Artificial Sequence
  Quasi-synthetic sequence derived from human genome
WRGFHWRQKFLRVKRSAICIQSWWRGTLGRRKAAK

SEQ ID NO: 27329 - protein, 35 aa, Artificial Sequence
  Quasi-synthetic sequence derived from human genome
RLRRANRVLRARCRRAVKSNACYWAVLLLVFLNTL

SEQ ID NO: 27330 - protein, 35 aa, Artificial Sequence
  Quasi-synthetic sequence derived from human genome
CLQYLGVRVLLRFQRKLSVLLLLLGRRRVDFRLVN

SEQ ID NO: 27331 - protein, 35 aa, Artificial Sequence
  Quasi-synthetic sequence derived from human genome
RTRGVGKVPRKKVNVKVFIIIAVFFICFVPFHFAR

SEQ ID NO: 27332 - protein, 35 aa, Artificial Sequence
  Quasi-synthetic sequence derived from human genome
PFLIIVGICLILIVIFMITKFVQDRHRARRNRLRK

SEQ ID NO: 27333 - protein, 35 aa, Artificial Sequence
  Quasi-synthetic sequence derived from human genome
RRLRKNLRALVVVHATWYVKAFLALLRPFISSKFT

SEQ ID NO: 27334 - protein, 35 aa, Artificial Sequence
  Quasi-synthetic sequence derived from human genome
LLKIKNTFCLWKRLIKLKDNHCEQLRVKIRKLKNK

SEQ ID NO: 27335 - protein, 35 aa, Artificial Sequence
  Quasi-synthetic sequence derived from human genome
QRVLPLKKPPMKSLRKKGSGKILTPAKKSFLRRLF

SEQ ID NO: 27336 - protein, 35 aa, Artificial Sequence
  Quasi-synthetic sequence derived from human genome
VVACMSIMALLLLLLLLLLYKYKQKPKYQVRWKII

SEQ ID NO: 27337 - protein, 35 aa, Artificial Sequence
  Quasi-synthetic sequence derived from human genome
LKRFNKEKLGLLLLTFLGIVAAVLVKKYQAVLRRK

SEQ ID NO: 27338 - protein, 35 aa, Artificial Sequence
  Quasi-synthetic sequence derived from human genome
LFQMPLFLKLFICFIFIRSSPTIVSNKRVSKRKFI

SEQ ID NO: 27339 - protein, 35 aa, Artificial Sequence
  Quasi-synthetic sequence derived from human genome
LAILGGMAFILLVLLCLLLYYCRRKCLKPRQHHRK

SEQ ID NO: 27340 - protein, 35 aa, Artificial Sequence
  Quasi-synthetic sequence derived from human genome
VKGWKLTQQQFVALLWKRLLIARRSRKGFFAQIVL

SEQ ID NO: 27341 - protein, 35 aa, Artificial Sequence
  Quasi-synthetic sequence derived from human genome
KLSMIRFRYRILRSQHFRTKSKVCKLRKAQRSWVQ

SEQ ID NO: 27342 - protein, 35 aa, Artificial Sequence
  Quasi-synthetic sequence derived from human genome
RLRQKVAVKKLSRPFQSLIHARRTYRELRLLKHLK

SEQ ID NO: 27343 - protein, 35 aa, Artificial Sequence
  Quasi-synthetic sequence derived from human genome
FWARRASRTRLAAWARRALLSLRSPKARRGKARRR

SEQ ID NO: 27344 - protein, 35 aa, Artificial Sequence
  Quasi-synthetic sequence derived from human genome
FLRLKRKFIQMRRPFLERRDLIIQHIPGFWVKAFL

SEQ ID NO: 27345 - protein, 35 aa, Artificial Sequence
  Quasi-synthetic sequence derived from human genome
VLYFNPWMRIFIQAKRVKTKHLCYCLYRPRKYLYV

SEQ ID NO: 27346 - protein, 35 aa, Artificial Sequence
  Quasi-synthetic sequence derived from human genome
KINRPRTELKKKLFKRRRVLNRERRLRHRVVGAVI

SEQ ID NO: 27347 - protein, 35 aa, Artificial Sequence
  Quasi-synthetic sequence derived from human genome
WWILRFPVFLAILINFFIFVRIVQLLVAKLRARQM

SEQ ID NO: 27348 - protein, 35 aa, Artificial Sequence
  Quasi-synthetic sequence derived from human genome
RRPKASLPRVFVLRALLMVLVFLLVVSYWLFYGVR

SEQ ID NO: 27349 - protein, 35 aa, Artificial Sequence
  Quasi-synthetic sequence derived from human genome
PRFIKIIEVKNKKLVELLRRKVRLAQPYVGVFLKR

SEQ ID NO: 27350 - protein, 35 aa, Artificial Sequence
  Quasi-synthetic sequence derived from human genome
RLARIGRILRLVRAARGIRTLLFALMMSLPSLFNI

SEQ ID NO: 27351 - protein, 35 aa, Artificial Sequence
  Quasi-synthetic sequence derived from human genome
CFCQKGFKIQSKLLKHKQIHTRNKAFRALLLKKRR

SEQ ID NO: 27352 - protein, 35 aa, Artificial Sequence
  Quasi-synthetic sequence derived from human genome
RRPSPYWRLTWRVVSPLLLTIFVAYIILLFWKPLR

SEQ ID NO: 27353 - protein, 35 aa, Artificial Sequence
  Quasi-synthetic sequence derived from human genome
YLLIIRSLRQGLRVEKRLKTKAVRMIAIVLAIFLV

SEQ ID NO: 27354 - protein, 35 aa, Artificial Sequence
  Quasi-synthetic sequence derived from human genome
YLRLLVKLYRFLARRTNSTFNQVVLKRLFMSRTNR

SEQ ID NO: 27355 - protein, 35 aa, Artificial Sequence
  Quasi-synthetic sequence derived from human genome
KLLAKKRVVRMLLVIVVLFFLCWLPVYSANTWRAF

SEQ ID NO: 27356 - protein, 35 aa, Artificial Sequence
  Quasi-synthetic sequence derived from human genome
QPLLAWLLLPLLLLLLVLLLAAYFFRFRKQRKAVV

SEQ ID NO: 27357 - protein, 35 aa, Artificial Sequence
  Quasi-synthetic sequence derived from human genome
RIPLVRNRRFQLCRCMNPRARKNRSQIALFQKLRF

SEQ ID NO: 27358 - protein, 35 aa, Artificial Sequence
  Quasi-synthetic sequence derived from human genome
RNLVLKNRSLKLQKMKYRPPKTKFFFTVIPQPIFL

SEQ ID NO: 27359 - protein, 35 aa, Artificial Sequence
  Quasi-synthetic sequence derived from human genome
NYVRLNMKQKHYVRGRALRSRLLRKQAWKQKWRKK

SEQ ID NO: 27360 - protein, 35 aa, Artificial Sequence
  Quasi-synthetic sequence derived from human genome
VVGWIIAISLLVGILIFLLLAVLLWKMGFFRRRYK

SEQ ID NO: 27361 - protein, 35 aa, Artificial Sequence
  Quasi-synthetic sequence derived from human genome
WRLPRISARAPYRLRRLRRHTYWPPRRPVAASRCW

SEQ ID NO: 27362 - protein, 35 aa, Artificial Sequence
  Quasi-synthetic sequence derived from human genome
GLKPFLLGCPRFVVIDNCIALKKVASRLKKKRKKK

SEQ ID NO: 27363 - protein, 35 aa, Artificial Sequence
  Quasi-synthetic sequence derived from human genome
KLKNILLRIQQIIYCHKLTIILTKWRNTARHKSKK

SEQ ID NO: 27364 - protein, 35 aa, Artificial Sequence
  Quasi-synthetic sequence derived from human genome
RKRTAKRAALMILTVWTISIFISMPPLFWRSHRRL

SEQ ID NO: 27365 - protein, 35 aa, Artificial Sequence
  Quasi-synthetic sequence derived from human genome
ILKTLLRCRNEKKRHRAVRLIFTIMIVYFLFWAPY

SEQ ID NO: 27366 - protein, 35 aa, Artificial Sequence
  Quasi-synthetic sequence derived from human genome
ILYFKPSVFRCIALRWVRLLGFAIVYGTIILKLYR

SEQ ID NO: 27367 - protein, 35 aa, Artificial Sequence
  Quasi-synthetic sequence derived from human genome
LLLKRFLLARRSRRGLFAQIVLPALFVGLALVFSL

SEQ ID NO: 27368 - protein, 35 aa, Artificial Sequence
  Quasi-synthetic sequence derived from human genome
AIILLIFISLFPEILLIVLKNVRRRSARRNLSCRR

SEQ ID NO: 27369 - protein, 35 aa, Artificial Sequence
  Quasi-synthetic sequence derived from human genome
AGVIAGAFVGILLFLILVGLLIFFLKRRNKKKQQK

SEQ ID NO: 27370 - protein, 35 aa, Artificial Sequence
  Quasi-synthetic sequence derived from human genome
WKHFLTLKMNISVLVLPLFIFTFLYVQMRKTLRFR

SEQ ID NO: 27371 - protein, 35 aa, Artificial Sequence
  Quasi-synthetic sequence derived from human genome
LIPTIKFRHCSLLRNRRCTVAYLYDRLLRIRALRW

SEQ ID NO: 27372 - protein, 35 aa, Artificial Sequence
  Quasi-synthetic sequence derived from human genome
LVLLALCLLLPLLLLGGWKRWRRGRAARHVVAVVL

SEQ ID NO: 27373 - protein, 35 aa, Artificial Sequence
  Quasi-synthetic sequence derived from human genome
KVCRGYLVKMGGKIKSWKKRWFVFDRLKRTLSYYV

SEQ ID NO: 27374 - protein, 35 aa, Artificial Sequence
  Quasi-synthetic sequence derived from human genome
VWRVLHALLCLHRTLTSWLRVRFGTWNWIWRRCCR

SEQ ID NO: 27375 - protein, 35 aa, Artificial Sequence
  Quasi-synthetic sequence derived from human genome
LILFMFRRLRQFRQAQPTPQYRFRKRDKVMFYGRK

SEQ ID NO: 27376 - protein, 35 aa, Artificial Sequence
  Quasi-synthetic sequence derived from human genome
LRYYYNKRILHKTKGKRFTYKFNFSKLIVVNYPLW

SEQ ID NO: 27377 - protein, 35 aa, Artificial Sequence
  Quasi-synthetic sequence derived from human genome
RSVVRRRSFSISPVRLRRSRTPLRRRFSRSPIRRK

SEQ ID NO: 27378 - protein, 35 aa, Artificial Sequence
  Quasi-synthetic sequence derived from human genome
LWLMERGGLGKPRGPRHRGLLRVRLGRFISRLLLW

SEQ ID NO: 27379 - protein, 35 aa, Artificial Sequence
  Quasi-synthetic sequence derived from human genome
LLKIVNFSRLIFHHLKRKAKSVVLVIVLGSLFFLV

SEQ ID NO: 27380 - protein, 35 aa, Artificial Sequence
  Quasi-synthetic sequence derived from human genome
MRKNMRVLSRTSKFRRLRQLLRRRKKRQQVRSISA

SEQ ID NO: 27381 - protein, 35 aa, Artificial Sequence
  Quasi-synthetic sequence derived from human genome
QWLAIQKLRSKIHKKVDRKASKGRKLRFHVLSKLL

SEQ ID NO: 27382 - protein, 35 aa, Artificial Sequence
  Quasi-synthetic sequence derived from human genome
LFICPFVLLLLLLISLLCLYWKARKLSTLRSNTRK

SEQ ID NO: 27383 - protein, 35 aa, Artificial Sequence
  Quasi-synthetic sequence derived from human genome
LLLGKGCRYFRYILKQDHQILGKKIKRMKRSVKKY

SEQ ID NO: 27384 - protein, 35 aa, Artificial Sequence
  Quasi-synthetic sequence derived from human genome
LLLLRWRRPALHRPIKVNLLIPVAYLVFWAFLLVF

SEQ ID NO: 27385 - protein, 35 aa, Artificial Sequence
  Quasi-synthetic sequence derived from human genome
MVRFVVRKTVQRSVAKGSRRCKKRMFKFHQMKHIF

SEQ ID NO: 27386 - protein, 35 aa, Artificial Sequence
  Quasi-synthetic sequence derived from human genome
VIPLLNPFIYSLRNKEVINIMKKIMKKRKFCHILK

SEQ ID NO: 27387 - protein, 35 aa, Artificial Sequence
  Quasi-synthetic sequence derived from human genome
REWFVIVIMATICFILLILSLICKIKLGPVRRKLK

SEQ ID NO: 27388 - protein, 35 aa, Artificial Sequence
  Quasi-synthetic sequence derived from human genome
VLRALRLLRIFKVTKYWASLRNLVVSLLNSMKSII

SEQ ID NO: 27389 - protein, 35 aa, Artificial Sequence
  Quasi-synthetic sequence derived from human genome
RLLLVHGRWSYIRMCKFLRYFFYKNFAFTLVHFWY

SEQ ID NO: 27390 - protein, 35 aa, Artificial Sequence
  Quasi-synthetic sequence derived from human genome
LVKRVNHWLTCSRWKKVQWCSLSVIKLKNKIKYRA

SEQ ID NO: 27391 - protein, 35 aa, Artificial Sequence
  Quasi-synthetic sequence derived from human genome
KKKMSKLSRSARAGVIFPVGRLMRYLKKGTFKYRI

SEQ ID NO: 27392 - protein, 35 aa, Artificial Sequence
  Quasi-synthetic sequence derived from human genome
HPFLLLILLCMSLLLFQVIRLYQRRRWMIRALHLF

SEQ ID NO: 27393 - protein, 35 aa, Artificial Sequence
  Quasi-synthetic sequence derived from human genome
RIDSEVYKTARALRIVRFTKILSLLRLLRLSRLIR

SEQ ID NO: 27394 - protein, 35 aa, Artificial Sequence
  Quasi-synthetic sequence derived from human genome
RLVVYKIVYMFLFLLCLTLFQVYYSLWRKLLKAFW

SEQ ID NO: 27395 - protein, 35 aa, Artificial Sequence
  Quasi-synthetic sequence derived from human genome
LLVAGVLVLLVSLGVAIHLCCRRRRARLRFMKQFY

SEQ ID NO: 27396 - protein, 35 aa, Artificial Sequence
  Quasi-synthetic sequence derived from human genome
LLSSRRARRIPKLVQRINSIYNAKRGKKRLKKLSM

SEQ ID NO: 27397 - protein, 35 aa, Artificial Sequence
  Quasi-synthetic sequence derived from human genome
VISIVDPWIFIIFRSPVFRIFFHKIFIRPLRYRSR

SEQ ID NO: 27398 - protein, 35 aa, Artificial Sequence
  Quasi-synthetic sequence derived from human genome
YLARQRYQQMRRSLVKFRSLVHAYVSRRRYLKLRA

SEQ ID NO: 27399 - protein, 35 aa, Artificial Sequence
  Quasi-synthetic sequence derived from human genome
RVILAPWKKGLIAVVIIGVIIALLIIAAKCYFLRK

SEQ ID NO: 27400 - protein, 35 aa, Artificial Sequence
  Quasi-synthetic sequence derived from human genome
MLLRKRYRHRPCRLQFLLLLLMLGCVLMMVAMLHP

SEQ ID NO: 27401 - protein, 35 aa, Artificial Sequence
  Quasi-synthetic sequence derived from human genome
RFIRVFIKTIRRDIFGGLVLLKVKAKVRQCLQERR

SEQ ID NO: 27402 - protein, 35 aa, Artificial Sequence
  Quasi-synthetic sequence derived from human genome
FNLPRLCIRKFFPKKKCFVFDRPVHRRKLAQLEKL

SEQ ID NO: 27403 - protein, 35 aa, Artificial Sequence
  Quasi-synthetic sequence derived from human genome
SRISITFFRLFRVMRLVKLLSRGEGIRTLLWTFIK

SEQ ID NO: 27404 - protein, 35 aa, Artificial Sequence
  Quasi-synthetic sequence derived from human genome
RPWPRWLGVAALGLAAVALGTVAWRRAWPRRRRRL

SEQ ID NO: 27405 - protein, 35 aa, Artificial Sequence
  Quasi-synthetic sequence derived from human genome
LRVLRMMRIFWVIKLARHFIGLQTLGLTLKRCYRE

SEQ ID NO: 27406 - protein, 35 aa, Artificial Sequence
  Quasi-synthetic sequence derived from human genome
LVLPLLVMAICYTGIIKTLLRCPSKKKYKAIRLIF

SEQ ID NO: 27407 - protein, 35 aa, Artificial Sequence
  Quasi-synthetic sequence derived from human genome
GGRWVRQQGPRVRRGISRLWLRVLLRLSPMAFRAL

SEQ ID NO: 27408 - protein, 35 aa, Artificial Sequence
  Quasi-synthetic sequence derived from human genome
LEQSRARLIPIIVLLLQKAWRGTLARWRCRRLRAI

SEQ ID NO: 27409 - protein, 35 aa, Artificial Sequence
  Quasi-synthetic sequence derived from human genome
KWKIFTNFKMNILGLLIPFTIFMFCYIKILHQLKR

SEQ ID NO: 27410 - protein, 35 aa, Artificial Sequence
  Quasi-synthetic sequence derived from human genome
VKKIALREIRMLKQLKHPNLVNLIEVFRRKRKMHL

SEQ ID NO: 27411 - protein, 35 aa, Artificial Sequence
  Quasi-synthetic sequence derived from human genome
RFLNLKKTIIKFQAHVRKHQQRQKYKKMKKAAVII

SEQ ID NO: 27412 - protein, 35 aa, Artificial Sequence
  Quasi-synthetic sequence derived from human genome
RYLRRFREMKPRVLQRWSRQILRGLHFLHSRVPPI

SEQ ID NO: 27413 - protein, 35 aa, Artificial Sequence
  Quasi-synthetic sequence derived from human genome
RGRRLGLALGLLLALVLAPRVLRAKPTVRKERVVR

SEQ ID NO: 27414 - protein, 35 aa, Artificial Sequence
  Quasi-synthetic sequence derived from human genome
IVFAVMLSILSLIGIFNRSFRTGIKRRILLLIPKW

SEQ ID NO: 27415 - protein, 35 aa, Artificial Sequence
  Quasi-synthetic sequence derived from human genome
LKMVWISKASAIQRKGRAGRCRPGICFRLFSRLRF

SEQ ID NO: 27416 - protein, 35 aa, Artificial Sequence
  Quasi-synthetic sequence derived from human genome
RQKCPPWWYRFAHKFLIWNCSPYWIKFKKCIYFIV

SEQ ID NO: 27417 - protein, 35 aa, Artificial Sequence
  Quasi-synthetic sequence derived from human genome
FFIFLKILKLLISKLKAHQMCFRDYKYRLAKSTLV

SEQ ID NO: 27418 - protein, 35 aa, Artificial Sequence
  Quasi-synthetic sequence derived from human genome
LLVLALASYRRLCLRLRLADCLVPYSRALYRRRRA

SEQ ID NO: 27419 - protein, 35 aa, Artificial Sequence
  Quasi-synthetic sequence derived from human genome
FYVYGARLYCLKIHGLSSLWRLFRGKKWNVLRQRV

SEQ ID NO: 27420 - protein, 35 aa, Artificial Sequence
  Quasi-synthetic sequence derived from human genome
KKPSSVRALSIVLPIVLLVFLCLGVFLLWKNWRLK

SEQ ID NO: 27421 - protein, 35 aa, Artificial Sequence
  Quasi-synthetic sequence derived from human genome
RRRYRKMLEEHKAVILQKYARAWLARRRFQSIRRF

SEQ ID NO: 27422 - protein, 35 aa, Artificial Sequence
  Quasi-synthetic sequence derived from human genome
KILGVLRVLRLLRTLRPLRVISRAPGLKLVVETLI

SEQ ID NO: 27423 - protein, 35 aa, Artificial Sequence
  Quasi-synthetic sequence derived from human genome
KSKIKSKYASYLSFIKILLKRGGVKVSTKNLIKLF

SEQ ID NO: 27424 - protein, 35 aa, Artificial Sequence
  Quasi-synthetic sequence derived from human genome
FRLVQASGQKAPRPAARRKARRLLKTVLMILLAFL

SEQ ID NO: 27425 - protein, 35 aa, Artificial Sequence
  Quasi-synthetic sequence derived from human genome
LGIMAKLLPLRALPLLFNLIKVVPRVFGRMVGKSR

SEQ ID NO: 27426 - protein, 35 aa, Artificial Sequence
  Quasi-synthetic sequence derived from human genome
RKLWWLPAHLPRFVRIVLSTLPNKHGILQKLRCLI

SEQ ID NO: 27427 - protein, 35 aa, Artificial Sequence
  Quasi-synthetic sequence derived from human genome
LRLRVHGPFFPRILRRRKGKREFGKTITHIVAKMM

SEQ ID NO: 27428 - protein, 35 aa, Artificial Sequence
  Quasi-synthetic sequence derived from human genome
LLRLFRMLRIFKLGKYWPTFQILMWSLSNSWVALK

SEQ ID NO: 27429 - protein, 35 aa, Artificial Sequence
  Quasi-synthetic sequence derived from human genome
LILKVAVGTRLHRVPVKIKRMCVNGLCRARKHRHL

SEQ ID NO: 27430 - protein, 35 aa, Artificial Sequence
  Quasi-synthetic sequence derived from human genome
VRIKTSIFSLFRAPKLRMRVFGLCFVRFAITVPFY

SEQ ID NO: 27431 - protein, 35 aa, Artificial Sequence
  Quasi-synthetic sequence derived from human genome
SIKSFFRQLNLYGFRKRRQCTFRTFTRIFSAKRLV

SEQ ID NO: 27432 - protein, 35 aa, Artificial Sequence
  Quasi-synthetic sequence derived from human genome
HIKLWRRNLWIFVSKFTEFDARKLHKLYKMAHKKR

SEQ ID NO: 27433 - protein, 35 aa, Artificial Sequence
  Quasi-synthetic sequence derived from human genome
IEKYFVSPTLFRVIRLARIGRILRLIKGAKGIRTL

SEQ ID NO: 27434 - protein, 35 aa, Artificial Sequence
  Quasi-synthetic sequence derived from human genome
LIEKYFVSPTLFRVIRLARIGRILRLIKGAKGIRT

SEQ ID NO: 27435 - protein, 35 aa, Artificial Sequence
  Quasi-synthetic sequence derived from human genome
FIRHWRQWNRIFRWKCHDIVKSKVFYWLVILIVAL

SEQ ID NO: 27436 - protein, 35 aa, Artificial Sequence
  Quasi-synthetic sequence derived from human genome
KTRFLRRKVQEGRLRRKQIKFEKDLRRIWLKAGLK

SEQ ID NO: 27437 - protein, 35 aa, Artificial Sequence
  Quasi-synthetic sequence derived from human genome
IHLPIYRHLRRFILSVIVFGSIVLLMLWLPIRIIK

SEQ ID NO: 27438 - protein, 35 aa, Artificial Sequence
  Quasi-synthetic sequence derived from human genome
RISITFFRLFRVMRLVKLLSKGEGIRTLLWTFIKS

SEQ ID NO: 27439 - protein, 35 aa, Artificial Sequence
  Quasi-synthetic sequence derived from human genome
LKLYRVLQLFLSRTAQRSALLSSGRLLRRLGLLLL

SEQ ID NO: 27440 - protein, 35 aa, Artificial Sequence
  Quasi-synthetic sequence derived from human genome
RKNYGLMRLGFLRLQALHRSRKLHQQYRLARQRII

SEQ ID NO: 27441 - protein, 35 aa, Artificial Sequence
  Quasi-synthetic sequence derived from human genome
LKQKARRLTILLLLAFYVCFLPFHILRVIRIESRL

SEQ ID NO: 27442 - protein, 35 aa, Artificial Sequence
  Quasi-synthetic sequence derived from human genome
LSVFRQPLSSLWRSLVPLFCWLRATFWLLATKRRK

SEQ ID NO: 27443 - protein, 35 aa, Artificial Sequence
  Quasi-synthetic sequence derived from human genome
FNLPRLCIRKFFPKKKCFVFDLPIHRRKLAQLEKL

SEQ ID NO: 27444 - protein, 35 aa, Artificial Sequence
  Quasi-synthetic sequence derived from human genome
LWRQQVCAIAKVRFLKLKKERKSLWTILLLFGISF

SEQ ID NO: 27445 - protein, 35 aa, Artificial Sequence
  Quasi-synthetic sequence derived from human genome
RGRPRLRLGERGLMEPLLPPKRRLLPRVRLLPLLL

SEQ ID NO: 27446 - protein, 35 aa, Artificial Sequence
  Quasi-synthetic sequence derived from human genome
WKFFIDRIRRQLKVTLCFSPVGNKLRVRSRKFPAI

SEQ ID NO: 27447 - protein, 35 aa, Artificial Sequence
  Quasi-synthetic sequence derived from human genome
PAIALAFLPLVVTLLVRYRHYFRLLVRTVLLRSLR

SEQ ID NO: 27448 - protein, 35 aa, Artificial Sequence
  Quasi-synthetic sequence derived from human genome
RRKSNPKPLVLSEARKQLMIYRLPQVLRLHLKRFR

SEQ ID NO: 27449 - protein, 35 aa, Artificial Sequence
  Quasi-synthetic sequence derived from human genome
KKKIFVFLEHQTKVLKKRHTKEKVLRRAKRRWAPI

SEQ ID NO: 27450 - protein, 35 aa, Artificial Sequence
  Quasi-synthetic sequence derived from human genome
RFLGRHFPRFYVLYTIFMKGLQMLWADAKKARRIK

SEQ ID NO: 27451 - protein, 35 aa, Artificial Sequence
  Quasi-synthetic sequence derived from human genome
LLLPKGVVLKLKPVADRFPKKAWRQKRSSVLKPLL

SEQ ID NO: 27452 - protein, 35 aa, Artificial Sequence
  Quasi-synthetic sequence derived from human genome
RVVVKILKPVKKKKIKREVKILENLRGGTNIIKLI

SEQ ID NO: 27453 - protein, 35 aa, Artificial Sequence
  Quasi-synthetic sequence derived from human genome
FVIRIRGINGVSPKVRKVLQLLRLRQIFNGTFVKL

SEQ ID NO: 27454 - protein, 35 aa, Artificial Sequence
  Quasi-synthetic sequence derived from human genome
LRTAMRRQMRRHASRRGPSRRRLGRLWNRLFHRPR

SEQ ID NO: 27455 - protein, 35 aa, Artificial Sequence
  Quasi-synthetic sequence derived from human genome
AYLVRKAFRHRLWAVLTVQAYARGMIARRLHQRLR

SEQ ID NO: 27456 - protein, 35 aa, Artificial Sequence
  Quasi-synthetic sequence derived from human genome
LRRQWKCVQRRCLRHLAHRLRRRHQRCQRRTPLAV

SEQ ID NO: 27457 - protein, 35 aa, Artificial Sequence
  Quasi-synthetic sequence derived from human genome
RWRTRYKTIRINLGLWAASFILALPVWVYSKVIKF

SEQ ID NO: 27458 - protein, 35 aa, Artificial Sequence
  Quasi-synthetic sequence derived from human genome
PVKAKTKRRLVLGLREVLKHLKLKKLKCVIISPNC

SEQ ID NO: 27459 - protein, 35 aa, Artificial Sequence
  Quasi-synthetic sequence derived from human genome
KGVWLRLRKILFCVLGLYIAIPFLIKLCPGIQAKL

SEQ ID NO: 27460 - protein, 35 aa, Artificial Sequence
  Quasi-synthetic sequence derived from human genome
LRRNKAALLFWHILLLGPIVRCLHTIRNYHKWLKN

SEQ ID NO: 27461 - protein, 35 aa, Artificial Sequence
  Quasi-synthetic sequence derived from human genome
KVLSVLKHSLLSFKRRRAMETLKLYFLFSLQLLIK

SEQ ID NO: 27462 - protein, 35 aa, Artificial Sequence
  Quasi-synthetic sequence derived from human genome
FFFHLIIFAFCIAVVYITYHNKRKIFLLVQSRKWR

SEQ ID NO: 27463 - protein, 35 aa, Artificial Sequence
  Quasi-synthetic sequence derived from human genome
FVYNHYLFSGCFLVVLLAILLYLLRLRRIHRRTPR

SEQ ID NO: 27464 - protein, 35 aa, Artificial Sequence
  Quasi-synthetic sequence derived from human genome
RMWRIRRRYCQVLNAVRIIQAYWRCRSCASRGFIK

SEQ ID NO: 27465 - protein, 35 aa, Artificial Sequence
  Quasi-synthetic sequence derived from human genome
KWKKHRQIVKPGFNISILKIFITMMSKSVRMMLNK

SEQ ID NO: 27466 - protein, 35 aa, Artificial Sequence
  Quasi-synthetic sequence derived from human genome
TFKTCKEYLRPLKKFLRKLHLPRDLPQKKKLKYMK

SEQ ID NO: 27467 - protein, 35 aa, Artificial Sequence
  Quasi-synthetic sequence derived from human genome
VRALWFWAFSLQAKVWATWLAFVLERRRKKARLQW

SEQ ID NO: 27468 - protein, 35 aa, Artificial Sequence
  Quasi-synthetic sequence derived from human genome
LLVAGVLVLLVSLGVAMHLCCRRRRARLRFMKQFY

SEQ ID NO: 27469 - protein, 35 aa, Artificial Sequence
  Quasi-synthetic sequence derived from human genome
RAVFRAFRRANARCFWNARLARAASRLAFQGWLRR

SEQ ID NO: 27470 - protein, 35 aa, Artificial Sequence
  Quasi-synthetic sequence derived from human genome
FFMPLGIILFCSFKIVWSLRRRQQLARQARMKKAT

SEQ ID NO: 27471 - protein, 35 aa, Artificial Sequence
  Quasi-synthetic sequence derived from human genome
MKTRRHLKSMHSSATLIQSRFRSLLVRRRFISLKK

SEQ ID NO: 27472 - protein, 35 aa, Artificial Sequence
  Quasi-synthetic sequence derived from human genome
IWHKFKQWVIPWHLNKRYNRKRFFALPYVDHFLRL

SEQ ID NO: 27473 - protein, 35 aa, Artificial Sequence
  Quasi-synthetic sequence derived from human genome
RRGVLLVRAPPACLQVLRDAWRRRALRPPRGFRIR

SEQ ID NO: 27474 - protein, 35 aa, Artificial Sequence
  Quasi-synthetic sequence derived from human genome
AKMKKKTFKGLIRIFRKGVIAVLAANRLKILGQSC

SEQ ID NO: 27475 - protein, 35 aa, Artificial Sequence
  Quasi-synthetic sequence derived from human genome
RCQFANGIFQLWFHFKRYRYRRPGPCWRPIRHCRR

SEQ ID NO: 27476 - protein, 35 aa, Artificial Sequence
  Quasi-synthetic sequence derived from human genome
AYWKGFQTRKRLKKLPSAVIALQRSFRSKRSKMLL

SEQ ID NO: 27477 - protein, 35 aa, Artificial Sequence
  Quasi-synthetic sequence derived from human genome
RIKYIEFKKSTVILQALVRGWLVRKRFLEQRAKIR

SEQ ID NO: 27478 - protein, 35 aa, Artificial Sequence
  Quasi-synthetic sequence derived from human genome
TYTFLTCFAGFWLIWGLIVLLCCFCSFLRRRLKRR

SEQ ID NO: 27479 - protein, 35 aa, Artificial Sequence
  Quasi-synthetic sequence derived from human genome
RGRLLRRTLIRYANLASVLVLRSVSTRVLKRFPTM

SEQ ID NO: 27480 - protein, 35 aa, Artificial Sequence
  Quasi-synthetic sequence derived from human genome
KPGQLINWFICSLCVPRVRKLWSSRRPRTRRNLLL

SEQ ID NO: 27481 - protein, 35 aa, Artificial Sequence
  Quasi-synthetic sequence derived from human genome
RRLRKNLKSLIIVHPSWFIRTLLAVTRPFISSKFS

SEQ ID NO: 27482 - protein, 35 aa, Artificial Sequence
  Quasi-synthetic sequence derived from human genome
LRVKLTVRYKRVTTHRRIWLALGLCWLVSFLVGLT

SEQ ID NO: 27483 - protein, 35 aa, Artificial Sequence
  Quasi-synthetic sequence derived from human genome
LLRKLGVKLVQRLGLTFLKPKVAAWRYQRGCRSLA

SEQ ID NO: 27484 - protein, 35 aa, Artificial Sequence
  Quasi-synthetic sequence derived from human genome
RRIVVSRGRLRRLLWIGFTLTAVALILWQCALLVF

SEQ ID NO: 27485 - protein, 35 aa, Artificial Sequence
  Quasi-synthetic sequence derived from human genome
QKLLKKIGISWNKKYRKQHGPLRKFLQLHSQIFLL

SEQ ID NO: 27486 - protein, 35 aa, Artificial Sequence
  Quasi-synthetic sequence derived from human genome
ILAFLAAVAAVLISLMWVCNKCAYKFQRKRRHKLK

SEQ ID NO: 27487 - protein, 35 aa, Artificial Sequence
  Quasi-synthetic sequence derived from human genome
KKNTLKKYKIACIVLLALLVIMSLGLGLGLGLRKL

SEQ ID NO: 27488 - protein, 35 aa, Artificial Sequence
  Quasi-synthetic sequence derived from human genome
VWAIFRPGTSFGISVLRALRLLRIFKITKYWASLR

SEQ ID NO: 27489 - protein, 35 aa, Artificial Sequence
  Quasi-synthetic sequence derived from human genome
RVLPRMQARMRGFQARKRYLRRRAALGQLNTILLV

SEQ ID NO: 27490 - protein, 35 aa, Artificial Sequence
  Quasi-synthetic sequence derived from human genome
HIRLRLSKLRRCVQWLKVMGLFAFVVLCSILFSLY

SEQ ID NO: 27491 - protein, 35 aa, Artificial Sequence
  Quasi-synthetic sequence derived from human genome
RRCKKRMFKFHQMKHIFEILDKMRCLRKRSTVSFL

SEQ ID NO: 27492 - protein, 35 aa, Artificial Sequence
  Quasi-synthetic sequence derived from human genome
FLKKLLGKKLTRCLKPFENSRLRLWTKWVFAGVSL

SEQ ID NO: 27493 - protein, 35 aa, Artificial Sequence
  Quasi-synthetic sequence derived from human genome
CYTGIIKILLRRPNEKKSKAVRLIFVIMIIFFLFW

SEQ ID NO: 27494 - protein, 35 aa, Artificial Sequence
  Quasi-synthetic sequence derived from human genome
KVIVVRNRRLGVLYRAVQLLILLYFVWYVFIVQKS

SEQ ID NO: 27495 - protein, 35 aa, Artificial Sequence
  Quasi-synthetic sequence derived from human genome
LKTYLRRFREMKPRVLQRWSRQILRGLHFLHSRVP

SEQ ID NO: 27496 - protein, 35 aa, Artificial Sequence
  Quasi-synthetic sequence derived from human genome
IWFLNPLKSARYFLWHTYRWLLLKLLLLLLLLLLL

SEQ ID NO: 27497 - protein, 35 aa, Artificial Sequence
  Quasi-synthetic sequence derived from human genome
WHVVSRKKQKIIKMLLIVALLFILSWLPLWTLMML

SEQ ID NO: 27498 - protein, 35 aa, Artificial Sequence
  Quasi-synthetic sequence derived from human genome
YLRGFLARNRYRKILREHKAVIIQKRVRGWLARTH

SEQ ID NO: 27499 - protein, 35 aa, Artificial Sequence
  Quasi-synthetic sequence derived from human genome
FFIIGLWWCTKSILKYICKKQKRTCYLGSKTLFYR

SEQ ID NO: 27500 - protein, 35 aa, Artificial Sequence
  Quasi-synthetic sequence derived from human genome
RRDSLLVIQWNIRAFMGVKNWPWMKLYFKIKPLLK

SEQ ID NO: 27501 - protein, 35 aa, Artificial Sequence
  Quasi-synthetic sequence derived from human genome
FRALLFVPRRAPFDLFENRKKKNNIKLYVRRVFIM

SEQ ID NO: 27502 - protein, 35 aa, Artificial Sequence
  Quasi-synthetic sequence derived from human genome
RLRHPRTRWKNWWVRGILTLAMIAFFFIIIYLGPM

SEQ ID NO: 27503 - protein, 35 aa, Artificial Sequence
  Quasi-synthetic sequence derived from human genome
FVWFLNPLKSIKYLICTRYKWLIIKIVLALLGLLM

SEQ ID NO: 27504 - protein, 35 aa, Artificial Sequence
  Quasi-synthetic sequence derived from human genome
LLRRLKLVKMYRSKNDLSQLQLLIKKWRSCSQLLL

SEQ ID NO: 27505 - protein, 35 aa, Artificial Sequence
  Quasi-synthetic sequence derived from human genome
LASCTRCLNKIMKTRVCRRLRRANRVLRARCRRAV

SEQ ID NO: 27506 - protein, 35 aa, Artificial Sequence
  Quasi-synthetic sequence derived from human genome
AVLPLALGLAITALLLLMVACRLRLVKQKLKKARP

SEQ ID NO: 27507 - protein, 35 aa, Artificial Sequence
  Quasi-synthetic sequence derived from human genome
FCTTVFTLLLLSIVILYCRIYSLVRTRSRRLTFRK

SEQ ID NO: 27508 - protein, 35 aa, Artificial Sequence
  Quasi-synthetic sequence derived from human genome
LTVLMVVSGAVLVYFVVRTVRMRRRNRKTRRYGVL

SEQ ID NO: 27509 - protein, 35 aa, Artificial Sequence
  Quasi-synthetic sequence derived from human genome
RNVKFPLPIYKSKKGWTAYKLQLFKMFPIILAILV

SEQ ID NO: 27510 - protein, 35 aa, Artificial Sequence
  Quasi-synthetic sequence derived from human genome
NWWSGFLLCAIAMFLVIFPMFTFPKKLPPRHKKKK

SEQ ID NO: 27511 - protein, 35 aa, Artificial Sequence
  Quasi-synthetic sequence derived from human genome
SKLRGLKRKWIRCSAQATVLHLKKFIAKKLNLSSF

SEQ ID NO: 27512 - protein, 35 aa, Artificial Sequence
  Quasi-synthetic sequence derived from human genome
RTLLRRRLFSYPTKYYFMVLVLSLITFSVLRIHQK

SEQ ID NO: 27513 - protein, 35 aa, Artificial Sequence
  Quasi-synthetic sequence derived from human genome
RGNSLMNNRTGRRKSWRLEFLFLRRRCFLLTFYLW

SEQ ID NO: 27514 - protein, 35 aa, Artificial Sequence
  Quasi-synthetic sequence derived from human genome
ASIWWIIRGPVILSILINFILFINILRILMRKLRT

SEQ ID NO: 27515 - protein, 35 aa, Artificial Sequence
  Quasi-synthetic sequence derived from human genome
RLLIYKQGRKLFPIKLKNKKGLVSLIDLLVLFTQL

SEQ ID NO: 27516 - protein, 35 aa, Artificial Sequence
  Quasi-synthetic sequence derived from human genome
FAKTWRVHAIFKNVKMKKKIIKDQKLLVIVGGMLL

SEQ ID NO: 27517 - protein, 35 aa, Artificial Sequence
  Quasi-synthetic sequence derived from human genome
LRTLFRSRSKRRHRTVKLIFAIVVAYFLSWGPYNF

SEQ ID NO: 27518 - protein, 35 aa, Artificial Sequence
  Quasi-synthetic sequence derived from human genome
IRRLLILILKIGRRWTELIRTMESRVLLRTFCLIF

SEQ ID NO: 27519 - protein, 35 aa, Artificial Sequence
  Quasi-synthetic sequence derived from human genome
RRRRRAKITGRERKAMRVLPVVVGAFLLCWTPFFV

SEQ ID NO: 27520 - protein, 35 aa, Artificial Sequence
  Quasi-synthetic sequence derived from human genome
LRMIRKHVRKNYMKFKAKFSLIQFHRIIESAILSF

SEQ ID NO: 27521 - protein, 35 aa, Artificial Sequence
  Quasi-synthetic sequence derived from human genome
WKFFIEKVRRQLKVILCFSPVGSVLRVRARKFPAV

SEQ ID NO: 27522 - protein, 35 aa, Artificial Sequence
  Quasi-synthetic sequence derived from human genome
YLSLPKTPKMLKMSKGLDARSKRWLKIIWRRHGIW

SEQ ID NO: 27523 - protein, 35 aa, Artificial Sequence
  Quasi-synthetic sequence derived from human genome
LLRCPSKKKYKAIRLIFVIMAVFFIFWTPYNVAIL

SEQ ID NO: 27524 - protein, 35 aa, Artificial Sequence
  Quasi-synthetic sequence derived from human genome
FALRYNILTLMRMLSLKSLKKQMKKVKKMTVKDMV

SEQ ID NO: 27525 - protein, 35 aa, Artificial Sequence
  Quasi-synthetic sequence derived from human genome
WLARTHYKRSMHAIIYLQCCFRRMMAKRELKKLKI

SEQ ID NO: 27526 - protein, 35 aa, Artificial Sequence
  Quasi-synthetic sequence derived from human genome
TTRRWKRWFKFRKRKGEKRPRPNHKAVARRAKLKF

SEQ ID NO: 27527 - protein, 35 aa, Artificial Sequence
  Quasi-synthetic sequence derived from human genome
LKKKLFLTLKENEKLRKRLQAQRLVMRRMSSRLRA

SEQ ID NO: 27528 - protein, 35 aa, Artificial Sequence
  Quasi-synthetic sequence derived from human genome
RQRRQKLLLAQLHHRKRVKAAGQIQAWWRGVLVRR

SEQ ID NO: 27529 - protein, 35 aa, Artificial Sequence
  Quasi-synthetic sequence derived from human genome
INPILYNLISKKYRAAAFKLLLARKSRPRGFHRSR

SEQ ID NO: 27530 - protein, 35 aa, Artificial Sequence
  Quasi-synthetic sequence derived from human genome
LKKHTLIRFLPRPIRQQLLYKRRYIFSVVENLQRL

SEQ ID NO: 27531 - protein, 35 aa, Artificial Sequence
  Quasi-synthetic sequence derived from human genome
KRLPVKRAAVQFLNNAWGIQKKQNAKRFKRRWMVR

SEQ ID NO: 27532 - protein, 35 aa, Artificial Sequence
  Quasi-synthetic sequence derived from human genome
TRRPRGSTARTLLRLLLRLLLFLGLLALALHFLGL

SEQ ID NO: 27533 - protein, 35 aa, Artificial Sequence
  Quasi-synthetic sequence derived from human genome
GVITMPQYLRKRFGGRRIRLYLSVLSLFLYIFTKI

SEQ ID NO: 27534 - protein, 35 aa, Artificial Sequence
  Quasi-synthetic sequence derived from human genome
RSLTYFSARKGKRKTVKAVIDRFLRLHCGLWVRRK

SEQ ID NO: 27535 - protein, 35 aa, Artificial Sequence
  Quasi-synthetic sequence derived from human genome
KLYIPYIILTIIILTIVGFIWLLKVNGCRKYKLNK

SEQ ID NO: 27536 - protein, 35 aa, Artificial Sequence
  Quasi-synthetic sequence derived from human genome
LRRFQGLLLDRRGRLHGQVLRLREVARRLERLRRR

SEQ ID NO: 27537 - protein, 35 aa, Artificial Sequence
  Quasi-synthetic sequence derived from human genome
TRVLYFSIFSMFCLIGLATWQVFYLRRFFKAKKLI

SEQ ID NO: 27538 - protein, 35 aa, Artificial Sequence
  Quasi-synthetic sequence derived from human genome
RVATRFTLPRFLQRRSSRRKVCTKTFLGPRIIGLR

SEQ ID NO: 27539 - protein, 35 aa, Artificial Sequence
  Quasi-synthetic sequence derived from human genome
RHKLLKLSVLLPLIFTILLLLLVAASLLAWRMMKY

SEQ ID NO: 27540 - protein, 35 aa, Artificial Sequence
  Quasi-synthetic sequence derived from human genome
FFRLQKFLRRTQFLLFFLTAAYLMTGSLLLLQRVR

SEQ ID NO: 27541 - protein, 35 aa, Artificial Sequence
  Quasi-synthetic sequence derived from human genome
RNMSWPRLIRKLRCYLKEMKNLRKLVFSRCLQNPL

SEQ ID NO: 27542 - protein, 35 aa, Artificial Sequence
  Quasi-synthetic sequence derived from human genome
GWLLLRKAPGGFMGPRWRRRWFVLKGHTLYWYRQP

SEQ ID NO: 27543 - protein, 35 aa, Artificial Sequence
  Quasi-synthetic sequence derived from human genome
FRYLQRLLLVHGRWSYFRMCKFLCYFFYKNFAFTL

SEQ ID NO: 27544 - protein, 35 aa, Artificial Sequence
  Quasi-synthetic sequence derived from human genome
FKKFYFHQHLCILKAKLGRPVTWNRQLRHFQGRKK

SEQ ID NO: 27545 - protein, 35 aa, Artificial Sequence
  Quasi-synthetic sequence derived from human genome
LRKSLKIIYLNSIQQLEIRNMSWPRLIRKLRCYLK

SEQ ID NO: 27546 - protein, 35 aa, Artificial Sequence
  Quasi-synthetic sequence derived from human genome
LVQRRKKRLRHRVPPRKPEPLVKLHRTALHWACLK

SEQ ID NO: 27547 - protein, 35 aa, Artificial Sequence
  Quasi-synthetic sequence derived from human genome
HRLSYTTLLLVLQYFGPLCFIFICYFKIYIRLKRR

SEQ ID NO: 27548 - protein, 35 aa, Artificial Sequence
  Quasi-synthetic sequence derived from human genome
VCPRLWMWSWKHIRKHRQKVKQYKELYKKKLTSKK

SEQ ID NO: 27549 - protein, 35 aa, Artificial Sequence
  Quasi-synthetic sequence derived from human genome
KKHLILAFCAGVLLTLLLIAFIFLIIKSYRKYHSK

SEQ ID NO: 27550 - protein, 35 aa, Artificial Sequence
  Quasi-synthetic sequence derived from human genome
FLFLRRRCFLLTFYLWFLFFSRFLLMLFLPLLTSV

SEQ ID NO: 27551 - protein, 35 aa, Artificial Sequence
  Quasi-synthetic sequence derived from human genome
TLGLLVAGVLVLLVSLGVAIHLCCRRRRARLRFMK

SEQ ID NO: 27552 - protein, 35 aa, Artificial Sequence
  Quasi-synthetic sequence derived from human genome
HMGVLVFQGTTKINTFNWSKVRKLSFKRKRFLIKL

SEQ ID NO: 27553 - protein, 35 aa, Artificial Sequence
  Quasi-synthetic sequence derived from human genome
IPLGRRFRSLKMWFVFRMYGVKGLQAYIRKHVQLS

SEQ ID NO: 27554 - protein, 35 aa, Artificial Sequence
  Quasi-synthetic sequence derived from human genome
WLRHRATQSGQRRWRHALHRRLLNRRLLLAVTPWV

SEQ ID NO: 27555 - protein, 35 aa, Artificial Sequence
  Quasi-synthetic sequence derived from human genome
FLKVIGKGSFGKVLLAKRKLDGKFYAVKVLQKKIV

SEQ ID NO: 27556 - protein, 35 aa, Artificial Sequence
  Quasi-synthetic sequence derived from human genome
MKRKKRVHFHGFMLDVHKRIHRLKQSLPKRKPGFM

SEQ ID NO: 27557 - protein, 35 aa, Artificial Sequence
  Quasi-synthetic sequence derived from human genome
LRQKLKKVFQQHYTNKIRALRNRLIVLLLECKRSR

SEQ ID NO: 27558 - protein, 35 aa, Artificial Sequence
  Quasi-synthetic sequence derived from human genome
KKLNKKRLKKRKGYQGAMVEKKILMKVHSRFIVSL

SEQ ID NO: 27559 - protein, 35 aa, Artificial Sequence
  Quasi-synthetic sequence derived from human genome
LKNLRKQYRNVKKMTAKELVKVLFSFFWMLFVGLF

SEQ ID NO: 27560 - protein, 35 aa, Artificial Sequence
  Quasi-synthetic sequence derived from human genome
KKKKVVKYGMGGMIIVLLICIVWFPLLFMSLIKSV

SEQ ID NO: 27561 - protein, 35 aa, Artificial Sequence
  Quasi-synthetic sequence derived from human genome
LLLLLLLLLFLILRHRRQGKHWTSSPAQLPTPRKK

SEQ ID NO: 27562 - protein, 35 aa, Artificial Sequence
  Quasi-synthetic sequence derived from human genome
RNRLRTVLKNLSLLKLLKSSNRRIQELHKLAKRCW

SEQ ID NO: 27563 - protein, 35 aa, Artificial Sequence
  Quasi-synthetic sequence derived from human genome
KSHCFRLGRQLSKALQVNCVVRKLLVQLRRLYWWV

SEQ ID NO: 27564 - protein, 35 aa, Artificial Sequence
  Quasi-synthetic sequence derived from human genome
MSVFPVVMYFWKRFCFWKATRSYLQYRGKKFKDRK

SEQ ID NO: 27565 - protein, 35 aa, Artificial Sequence
  Quasi-synthetic sequence derived from human genome
AAKKAGLLMALARLCFLLGRLCSRRLKLSQARVYF

SEQ ID NO: 27566 - protein, 35 aa, Artificial Sequence
  Quasi-synthetic sequence derived from human genome
RRGRLARCWARCRDWRRMALVSALLLMLFCVALWP

SEQ ID NO: 27567 - protein, 35 aa, Artificial Sequence
  Quasi-synthetic sequence derived from human genome
WKNVTLKRRSPWVLAFEIFIPLVLFFILLGLRQKK

SEQ ID NO: 27568 - protein, 35 aa, Artificial Sequence
  Quasi-synthetic sequence derived from human genome
LRLTPGLRKVLFATALGTVALALAAHQLKRRRRRK

SEQ ID NO: 27569 - protein, 35 aa, Artificial Sequence
  Quasi-synthetic sequence derived from human genome
IVKQGYVRIRSRRLGIYQRCWLVFKKASSKGPKRL

SEQ ID NO: 27570 - protein, 35 aa, Artificial Sequence
  Quasi-synthetic sequence derived from human genome
ARMWAARRQYLRRLHYFQKNVNSIVKIQAFFRARK

SEQ ID NO: 27571 - protein, 35 aa, Artificial Sequence
  Quasi-synthetic sequence derived from human genome
RIKKILKEGPMLKNCNSFKRWKLRYFLVQGQKLYF

SEQ ID NO: 27572 - protein, 35 aa, Artificial Sequence
  Quasi-synthetic sequence derived from human genome
ILFSLYTRTLYLRYRPKVKFLFGIWPVILFEPLRK

SEQ ID NO: 27573 - protein, 35 aa, Artificial Sequence
  Quasi-synthetic sequence derived from human genome
PRPRGKLAGLLRTFMRSRPSRQRLRQRGILRQRVF

SEQ ID NO: 27574 - protein, 35 aa, Artificial Sequence
  Quasi-synthetic sequence derived from human genome
VLLLKKLKAWNDIKKVYASQRMRAGKGKMRNRRRI

SEQ ID NO: 27575 - protein, 35 aa, Artificial Sequence
  Quasi-synthetic sequence derived from human genome
AIRSWLTRKHIQRLHAAATVIKRAWQKWRIRMACL

SEQ ID NO: 27576 - protein, 35 aa, Artificial Sequence
  Quasi-synthetic sequence derived from human genome
FSVITSYILFRATRKPLSGRTPRLVYKWFLLIYKL

SEQ ID NO: 27577 - protein, 35 aa, Artificial Sequence
  Quasi-synthetic sequence derived from human genome
IIRFLPLFKIIVPILIRIADVQIKKRLSLMYSITK

SEQ ID NO: 27578 - protein, 35 aa, Artificial Sequence
  Quasi-synthetic sequence derived from human genome
GLRKTFWFFFQRHKLKGTSFLLGGVVIVLLRWPLL

SEQ ID NO: 27579 - protein, 35 aa, Artificial Sequence
  Quasi-synthetic sequence derived from human genome
LQSRIRMIIAVTSYKRYLWATVTIQRHWRAYLRRK

SEQ ID NO: 27580 - protein, 35 aa, Artificial Sequence
  Quasi-synthetic sequence derived from human genome
WKVAHLKEHRRVFQAMWLSFLKHKLPLSLYKKVLL

SEQ ID NO: 27581 - protein, 35 aa, Artificial Sequence
  Quasi-synthetic sequence derived from human genome
RIKIFFALAPVFSTKYLKSPLIRMTYKWKSIVMAF

SEQ ID NO: 27582 - protein, 35 aa, Artificial Sequence
  Quasi-synthetic sequence derived from human genome
VVKLNRNRMSMIPPKIFKLPHLQFLELKRNRIKIV

SEQ ID NO: 27583 - protein, 35 aa, Artificial Sequence
  Quasi-synthetic sequence derived from human genome
LPKPRMRGLLARRLRNHMAVAFVLSLGVAALYKFR

SEQ ID NO: 27584 - protein, 35 aa, Artificial Sequence
  Quasi-synthetic sequence derived from human genome
RILFLKPSCMLEVITWPIQAFVKRKVIIFLKKCLL

SEQ ID NO: 27585 - protein, 35 aa, Artificial Sequence
  Quasi-synthetic sequence derived from human genome
IFCKKCILRWLARQKTCPCCRKEVKRKKVVHMNKL

SEQ ID NO: 27586 - protein, 35 aa, Artificial Sequence
  Quasi-synthetic sequence derived from human genome
RLSRALLTAVTNVLIFFWCLAFLWGLLILLKYRWR

SEQ ID NO: 27587 - protein, 35 aa, Artificial Sequence
  Quasi-synthetic sequence derived from human genome
RASSNRNFLLTMRPFLKRAILVLSYVLVILYFRLW

SEQ ID NO: 27588 - protein, 35 aa, Artificial Sequence
  Quasi-synthetic sequence derived from human genome
LVVRFLKRASNNLQHSLRMVLPSRRLALLERRRIL

SEQ ID NO: 27589 - protein, 35 aa, Artificial Sequence
  Quasi-synthetic sequence derived from human genome
RMWGRLVGLVYILPAAYFWRKGWLSRGMKGRVLAL

SEQ ID NO: 27590 - protein, 35 aa, Artificial Sequence
  Quasi-synthetic sequence derived from human genome
LLLIKKVTWTMNGLMLPTDIKRRKTKPVLSIRMKK

SEQ ID NO: 27591 - protein, 35 aa, Artificial Sequence
  Quasi-synthetic sequence derived from human genome
RWARPFYLAFVFCLALGLLQAIKLYLRRQRLLRDL

SEQ ID NO: 27592 - protein, 35 aa, Artificial Sequence
  Quasi-synthetic sequence derived from human genome
KKRNSTLYITMLLIVPVIVAGAIIVLLLYLKRLKI

SEQ ID NO: 27593 - protein, 35 aa, Artificial Sequence
  Quasi-synthetic sequence derived from human genome
RLKSQLLLQKYIAQRKWKKHFYVVTAANRLRKFPT

SEQ ID NO: 27594 - protein, 35 aa, Artificial Sequence
  Quasi-synthetic sequence derived from human genome
LFLCLFFYNCYKGYLPRQCLKFRSALLIGKKKPKS

SEQ ID NO: 27595 - protein, 35 aa, Artificial Sequence
  Quasi-synthetic sequence derived from human genome
WVYRHQARHKAVVLRCHAVLLARAHKARALARLLR

SEQ ID NO: 27596 - protein, 35 aa, Artificial Sequence
  Quasi-synthetic sequence derived from human genome
VWFHVLFYLAVGIMFLVNTVLWVTIRKELKRKKKW

SEQ ID NO: 27597 - protein, 35 aa, Artificial Sequence
  Quasi-synthetic sequence derived from human genome
LGLFQGPALGLRNHLGRKLRRRKKKKAKRTTNWKI

SEQ ID NO: 27598 - protein, 35 aa, Artificial Sequence
  Quasi-synthetic sequence derived from human genome
SPSLRIARFRFRAFHFLNRFPSVYLRCKMVVCRAY

SEQ ID NO: 27599 - protein, 35 aa, Artificial Sequence
  Quasi-synthetic sequence derived from human genome
LFHLLVQKSKKSSTFKFYRRHKMPAPAQRKLLPRR

SEQ ID NO: 27600 - protein, 35 aa, Artificial Sequence
  Quasi-synthetic sequence derived from human genome
LFARHRTKMRRKKRFAKQGNKWYKQHLSYRLVNWP

SEQ ID NO: 27601 - protein, 35 aa, Artificial Sequence
  Quasi-synthetic sequence derived from human genome
ALAAQLALLGLGLLHALLLVLLLCRLRRLRARARA

SEQ ID NO: 27602 - protein, 35 aa, Artificial Sequence
  Quasi-synthetic sequence derived from human genome
RRLRLQQLATLIQKIYRGWRCRTHYQLMRKSQILI

SEQ ID NO: 27603 - protein, 35 aa, Artificial Sequence
  Quasi-synthetic sequence derived from human genome
VLRYRHKRLSYQSVFLFLCLFWASLRTVLFSFYFK

SEQ ID NO: 27604 - protein, 35 aa, Artificial Sequence
  Quasi-synthetic sequence derived from human genome
PSPRPVLLRGARAALLLLLPPRLLARPSLLLRRSL

SEQ ID NO: 27605 - protein, 35 aa, Artificial Sequence
  Quasi-synthetic sequence derived from human genome
FKNLFYRTYMLFKNASGKRRFLLCLLLFTVITYFF

SEQ ID NO: 27606 - protein, 35 aa, Artificial Sequence
  Quasi-synthetic sequence derived from human genome
HFLVHWFKKLSQKRFKQLVERLLQFISLRLFPAKP

SEQ ID NO: 27607 - protein, 35 aa, Artificial Sequence
  Quasi-synthetic sequence derived from human genome
PRSFRRHIRQHSALTRLRLRNVFRRFLRDFQPGRL

SEQ ID NO: 27608 - protein, 35 aa, Artificial Sequence
  Quasi-synthetic sequence derived from human genome
VSWRTRMRAFHLSLPGGAQLLTYLVKVLKRRTWRR

SEQ ID NO: 27609 - protein, 35 aa, Artificial Sequence
  Quasi-synthetic sequence derived from human genome
RIGRILRLIRAAKGIRTLLFALMMSLPALFNIGLL

SEQ ID NO: 27610 - protein, 35 aa, Artificial Sequence
  Quasi-synthetic sequence derived from human genome
LLPHLLPALGFKNKTVLKKRCKDCYLVKRRGRWYV

SEQ ID NO: 27611 - protein, 35 aa, Artificial Sequence
  Quasi-synthetic sequence derived from human genome
RLSFVYNHYLFFACILVVLLAIFLYLLRLRRIHHR

SEQ ID NO: 27612 - protein, 35 aa, Artificial Sequence
  Quasi-synthetic sequence derived from human genome
FRQRIILRVWWSTWRQRLGQVRVSRALHASALKHR

SEQ ID NO: 27613 - protein, 35 aa, Artificial Sequence
  Quasi-synthetic sequence derived from human genome
LLSLRYDLTVPFARYLAMNKVKKMKRYHVGKVWRR

SEQ ID NO: 27614 - protein, 35 aa, Artificial Sequence
  Quasi-synthetic sequence derived from human genome
RVALARVSSVKLISKAKIRTVKMTFIIVLAFIVCW

SEQ ID NO: 27615 - protein, 35 aa, Artificial Sequence
  Quasi-synthetic sequence derived from human genome
LIMRLKMFLTPHMCVMASLICSRQLFGWLFRRVRF

SEQ ID NO: 27616 - protein, 35 aa, Artificial Sequence
  Quasi-synthetic sequence derived from human genome
LKTFVFFIWRRYWRTLVLLLLVLLTVFLLLVFYTI

SEQ ID NO: 27617 - protein, 35 aa, Artificial Sequence
  Quasi-synthetic sequence derived from human genome
ITNRPKGFTRFRSAVRVSIAISRMKFLVRRWHRVT

SEQ ID NO: 27618 - protein, 35 aa, Artificial Sequence
  Quasi-synthetic sequence derived from human genome
LRRALRHDLGGKRLSKIATLRRAIHRIAALSLVLR

SEQ ID NO: 27619 - protein, 35 aa, Artificial Sequence
  Quasi-synthetic sequence derived from human genome
KVARKFWWKNVKMIVLICVIVFIIILFIVLFATGA

SEQ ID NO: 27620 - protein, 35 aa, Artificial Sequence
  Quasi-synthetic sequence derived from human genome
VLAKKMLRKALKLLNRIFPYNLISLFLHIHVEKNR

SEQ ID NO: 27621 - protein, 35 aa, Artificial Sequence
  Quasi-synthetic sequence derived from human genome
IRSYILNKDLLRKALILMNSKHTHLILCVLRFMRR

SEQ ID NO: 27622 - protein, 35 aa, Artificial Sequence
  Quasi-synthetic sequence derived from human genome
RVRGRVLKKFKSDSGLAQRRFIRGWGLCIFLPFVL

SEQ ID NO: 27623 - protein, 35 aa, Artificial Sequence
  Quasi-synthetic sequence derived from human genome
KRHRSSFRNRFPLLKVLILQRNKLSDTPKGLWKLK

SEQ ID NO: 27624 - protein, 35 aa, Artificial Sequence
  Quasi-synthetic sequence derived from human genome
ALKEGLRAWKRIFWRQILLTLGLLGLFLYGLPKFR

SEQ ID NO: 27625 - protein, 35 aa, Artificial Sequence
  Quasi-synthetic sequence derived from human genome
MRRIRYEFKAKNIKKKKVSIMVSVDGVKVILKKKK

SEQ ID NO: 27626 - protein, 35 aa, Artificial Sequence
  Quasi-synthetic sequence derived from human genome
KFKKFDHRYLRKILIRKNLPKSSIVSLYKKLEMKQ

SEQ ID NO: 27627 - protein, 35 aa, Artificial Sequence
  Quasi-synthetic sequence derived from human genome
YMLFLLVLVFFLMGLVGFMICHVLKKKGYRCRTSR

SEQ ID NO: 27628 - protein, 35 aa, Artificial Sequence
  Quasi-synthetic sequence derived from human genome
RKLLALGTWLLALLLTLPVMLAMRLVRRGPKSLCL

SEQ ID NO: 27629 - protein, 35 aa, Artificial Sequence
  Quasi-synthetic sequence derived from human genome
KLCSRFLLKCGFITIPWRCIKKCSPLMPRAAVPRF

SEQ ID NO: 27630 - protein, 35 aa, Artificial Sequence
  Quasi-synthetic sequence derived from human genome
RVLLLFRAAQCSFPVAQWYILQLRWARKVMQKIRM

SEQ ID NO: 27631 - protein, 35 aa, Artificial Sequence
  Quasi-synthetic sequence derived from human genome
MRRLTRRLVLPVFGVLWITVLLFFWVTKRKLEVPT

SEQ ID NO: 27632 - protein, 35 aa, Artificial Sequence
  Quasi-synthetic sequence derived from human genome
RYLTRRRRIEIAHALCLTERQIKIWFQNRRMKWKK

SEQ ID NO: 27633 - protein, 35 aa, Artificial Sequence
  Quasi-synthetic sequence derived from human genome
RTQLLYLLAVAVVIILFIILLGVIMAKRKRKHGSL

SEQ ID NO: 27634 - protein, 35 aa, Artificial Sequence
  Quasi-synthetic sequence derived from human genome
VNLAAMVWRRLLRKRWVLALVFGLSLVYFLSSTFK

SEQ ID NO: 27635 - protein, 35 aa, Artificial Sequence
  Quasi-synthetic sequence derived from human genome
KCALVRHKFNRLPRVLILHLKRYSFNVALSLNNKI

SEQ ID NO: 27636 - protein, 35 aa, Artificial Sequence
  Quasi-synthetic sequence derived from human genome
NTALLSLVLMAGTFFIAFFLRKFKNSRFFPGRIRR

SEQ ID NO: 27637 - protein, 35 aa, Artificial Sequence
  Quasi-synthetic sequence derived from human genome
NSKGKDINTIKSLRVLRVLRPLKTIKRLPKLKAVF

SEQ ID NO: 27638 - protein, 35 aa, Artificial Sequence
  Quasi-synthetic sequence derived from human genome
GSKGKDINTIKSLRVLRVLRPLKTIKRLPKLKAVF

SEQ ID NO: 27639 - protein, 35 aa, Artificial Sequence
  Quasi-synthetic sequence derived from human genome
MSLVIRNLQRVIPIRRAPLRSKIEIVRRILGVQKF

SEQ ID NO: 27640 - protein, 35 aa, Artificial Sequence
  Quasi-synthetic sequence derived from human genome
KKKKSMIGMSTKLWKVKKALKMTIFWRGLMPEFQF

SEQ ID NO: 27641 - protein, 35 aa, Artificial Sequence
  Quasi-synthetic sequence derived from human genome
ITLMRRILTRNEKNRPRRRFLCHLSRQQLRMAMRI

SEQ ID NO: 27642 - protein, 35 aa, Artificial Sequence
  Quasi-synthetic sequence derived from human genome
KIQRFHARSLWTNHKRYGYKKHSYRLVKKLKLQKM

SEQ ID NO: 27643 - protein, 35 aa, Artificial Sequence
  Quasi-synthetic sequence derived from human genome
LKIKNTFCLWKRLIKLKDNHCEQLRVKIRKLKNKA

SEQ ID NO: 27644 - protein, 35 aa, Artificial Sequence
  Quasi-synthetic sequence derived from human genome
QRLLFRIGYSLYTRTWLGYLFYRQQLRRARNRYPK

SEQ ID NO: 27645 - protein, 35 aa, Artificial Sequence
  Quasi-synthetic sequence derived from human genome
ILAKISRPKKRAKTITFSKNAVISKRGGKLCLLIR

SEQ ID NO: 27646 - protein, 35 aa, Artificial Sequence
  Quasi-synthetic sequence derived from human genome
RRRMPGIGWLKKCYQMIDRRLRKNLKSLIIVHPSW

SEQ ID NO: 27647 - protein, 35 aa, Artificial Sequence
  Quasi-synthetic sequence derived from human genome
PFLLLILLCMSLLLFQVIRLYQRRRWTIRAMHLFP

SEQ ID NO: 27648 - protein, 35 aa, Artificial Sequence
  Quasi-synthetic sequence derived from human genome
VLSDIIQKYFFSPTLFRVIRLARIGRILRLIRGAK

SEQ ID NO: 27649 - protein, 35 aa, Artificial Sequence
  Quasi-synthetic sequence derived from human genome
VYRKYICTSFYPWVNILKISFKRKKFFIHQRQKQA

SEQ ID NO: 27650 - protein, 35 aa, Artificial Sequence
  Quasi-synthetic sequence derived from human genome
WEKKKPVPVLLGSLLKRKMLPRAALLVTTRPRALR

SEQ ID NO: 27651 - protein, 35 aa, Artificial Sequence
  Quasi-synthetic sequence derived from human genome
FLALFKAAEFAKLSIKWMIKIRKRYLKRRGQATSH

SEQ ID NO: 27652 - protein, 35 aa, Artificial Sequence
  Quasi-synthetic sequence derived from human genome
RTLTQKRYLVKFICLSIWGLSLLLALPVLLFRRTV

SEQ ID NO: 27653 - protein, 35 aa, Artificial Sequence
  Quasi-synthetic sequence derived from human genome
GRPHLPGKKKIRWDPVRRRFIQSCPIIRIPNRFLR

SEQ ID NO: 27654 - protein, 35 aa, Artificial Sequence
  Quasi-synthetic sequence derived from human genome
MNKDLLRRVLVLMNSKHTFLALCALRFMRRIIGLK

SEQ ID NO: 27655 - protein, 35 aa, Artificial Sequence
  Quasi-synthetic sequence derived from human genome
SIRASLTFNRGFKAGRNMRRKLFGVLRLKCHSLFL

SEQ ID NO: 27656 - protein, 35 aa, Artificial Sequence
  Quasi-synthetic sequence derived from human genome
WRVLVGVGVPVVFIIILVLCLRLLQSRCPRVLPKK

SEQ ID NO: 27657 - protein, 35 aa, Artificial Sequence
  Quasi-synthetic sequence derived from human genome
LLLLHNQLLYERFKRQQHALRNRRLLRKVIKAAAL

SEQ ID NO: 27658 - protein, 35 aa, Artificial Sequence
  Quasi-synthetic sequence derived from human genome
AVLITGYIQICFWVIAAARQIQKMRKFYFRRIMRM

SEQ ID NO: 27659 - protein, 35 aa, Artificial Sequence
  Quasi-synthetic sequence derived from human genome
LPMWVLALIVIFLTIAVLLALRFCGIYGYRLRRKW

SEQ ID NO: 27660 - protein, 35 aa, Artificial Sequence
  Quasi-synthetic sequence derived from human genome
RYFRIQEVLKHARHFRGRKNRCYRLAVRTVIRAFV

SEQ ID NO: 27661 - protein, 35 aa, Artificial Sequence
  Quasi-synthetic sequence derived from human genome
KRAIRIILSFFFLFLLYFLAFLIASFGNFLPKTKM

SEQ ID NO: 27662 - protein, 35 aa, Artificial Sequence
  Quasi-synthetic sequence derived from human genome
CTLLHCFVILPVFLTFFPPSKKHHKKKKRAKRKER

SEQ ID NO: 27663 - protein, 35 aa, Artificial Sequence
  Quasi-synthetic sequence derived from human genome
LLWKMRLFQRQWANSFFQGLQQRMLQRSLRWWHLR

SEQ ID NO: 27664 - protein, 35 aa, Artificial Sequence
  Quasi-synthetic sequence derived from human genome
KVMFTKVLKAQLWVYLRPVPRPATVYLQILRLKPL

SEQ ID NO: 27665 - protein, 35 aa, Artificial Sequence
  Quasi-synthetic sequence derived from human genome
RYLTRRRRIEIAHALCLSERQIKIWFQNRRMKWKK

SEQ ID NO: 27666 - protein, 35 aa, Artificial Sequence
  Quasi-synthetic sequence derived from human genome
RKRKNSVKVMYKCLWPNCGKVLRSIVGIKRHVKAL

SEQ ID NO: 27667 - protein, 35 aa, Artificial Sequence
  Quasi-synthetic sequence derived from human genome
KKKRKKGLRIKGKRRRKKLILAKKFSKDLGSGRPV

SEQ ID NO: 27668 - protein, 35 aa, Artificial Sequence
  Quasi-synthetic sequence derived from human genome
MAITQFRLFKFCTCLATVFSFLKRLICRSGRGRKL

SEQ ID NO: 27669 - protein, 35 aa, Artificial Sequence
  Quasi-synthetic sequence derived from human genome
KVSKIQRFHARSLWTNHKRYGYKKHSYRLVKKLKL

SEQ ID NO: 27670 - protein, 35 aa, Artificial Sequence
  Quasi-synthetic sequence derived from human genome
LIKATVIPNRVKMLPYFGIIRNRMMSTHKSKKKIR

SEQ ID NO: 27671 - protein, 35 aa, Artificial Sequence
  Quasi-synthetic sequence derived from human genome
KKNLKALYVVHPTSFIKVLWNILKPLISHKFGKKV

SEQ ID NO: 27672 - protein, 35 aa, Artificial Sequence
  Quasi-synthetic sequence derived from human genome
LLKIANFSNLLFLHLKRRVRSVILVILLGTLIFLV

SEQ ID NO: 27673 - protein, 35 aa, Artificial Sequence
  Quasi-synthetic sequence derived from human genome
WALLCKNCLKKWRMKRQTLLEWLFSFLLVLFLYLF

SEQ ID NO: 27674 - protein, 35 aa, Artificial Sequence
  Quasi-synthetic sequence derived from human genome
IWLLVLLLHKHRSILLRRLCSLMGTVFLLRCFTMF

SEQ ID NO: 27675 - protein, 35 aa, Artificial Sequence
  Quasi-synthetic sequence derived from human genome
KFNIAVGLILCISLVILTFQWRFYLSFRKLMRWIL

SEQ ID NO: 27676 - protein, 35 aa, Artificial Sequence
  Quasi-synthetic sequence derived from human genome
LLVIYVSWKRYPASMKQLQQRSLMRRHRKKKRQSL

SEQ ID NO: 27677 - protein, 35 aa, Artificial Sequence
  Quasi-synthetic sequence derived from human genome
KLRNIRYGFNTILVILIWRIFIARSQMARNIWYFV

SEQ ID NO: 27678 - protein, 35 aa, Artificial Sequence
  Quasi-synthetic sequence derived from human genome
IRHSRKMRKLMLDLNKAKSMGQRLSLISKFRFNFL

SEQ ID NO: 27679 - protein, 35 aa, Artificial Sequence
  Quasi-synthetic sequence derived from human genome
FFGRVYLGLSIALRFPALVLYIVFIFAMKKKFQGK

SEQ ID NO: 27680 - protein, 35 aa, Artificial Sequence
  Quasi-synthetic sequence derived from human genome
ARLWLHVLPTLPGTLCLRIFRWGPRRRRQGSRTLL

SEQ ID NO: 27681 - protein, 35 aa, Artificial Sequence
  Quasi-synthetic sequence derived from human genome
KSRKKPEILKVCQISRLYRLLVVTIIHLHFLKQVK

SEQ ID NO: 27682 - protein, 35 aa, Artificial Sequence
  Quasi-synthetic sequence derived from human genome
LLAILLVVAVFCILWNWNKRKKRQVPYLRVTVMPL

SEQ ID NO: 27683 - protein, 35 aa, Artificial Sequence
  Quasi-synthetic sequence derived from human genome
FRFWPFLVIIVILSALFLGTLACFCVWRRKRKEKQ

SEQ ID NO: 27684 - protein, 35 aa, Artificial Sequence
  Quasi-synthetic sequence derived from human genome
ARSGKIPSRFKRSYNYKTIVKKILAKLKRARSKKL

SEQ ID NO: 27685 - protein, 35 aa, Artificial Sequence
  Quasi-synthetic sequence derived from human genome
AGVRGYLARRRIRLWHRGAMVIQATWRGYRVRRNL

SEQ ID NO: 27686 - protein, 35 aa, Artificial Sequence
  Quasi-synthetic sequence derived from human genome
MVGKIKRLKKSAFVVLILLITAKLLVLPLLCREMV

SEQ ID NO: 27687 - protein, 35 aa, Artificial Sequence
  Quasi-synthetic sequence derived from human genome
LRRTRLILFVLLLFGIYGLLKNPFLSVRFRTTTGL

SEQ ID NO: 27688 - protein, 35 aa, Artificial Sequence
  Quasi-synthetic sequence derived from human genome
LLRRWKHWLLLLGICCPKPHGRVSSRLRLSRSLGH

SEQ ID NO: 27689 - protein, 35 aa, Artificial Sequence
  Quasi-synthetic sequence derived from human genome
LRALLLWGRRLRPLLRAPALAAVPGGKPILCPRRT

SEQ ID NO: 27690 - protein, 35 aa, Artificial Sequence
  Quasi-synthetic sequence derived from human genome
VYLAGYLGLSITWLLLGALLWMWWRRNRRGKLGRL

SEQ ID NO: 27691 - protein, 35 aa, Artificial Sequence
  Quasi-synthetic sequence derived from human genome
RRVAERVAARVQRRPWGAWLSARLWKWLKSPRSWR

SEQ ID NO: 27692 - protein, 35 aa, Artificial Sequence
  Quasi-synthetic sequence derived from human genome
AFVLLIFIVSMIYLACKKPKKPQRRQNNRLKPLTL

SEQ ID NO: 27693 - protein, 35 aa, Artificial Sequence
  Quasi-synthetic sequence derived from human genome
RQSSFIAVGILGVVLLAIFVALFFLTKKRRQRQRL

SEQ ID NO: 27694 - protein, 35 aa, Artificial Sequence
  Quasi-synthetic sequence derived from human genome
IIYAFVGEKFRRYLSVFFRKHITKRFCKQCPVFYR

SEQ ID NO: 27695 - protein, 35 aa, Artificial Sequence
  Quasi-synthetic sequence derived from human genome
ASCLVLFPRFLGTAFMLWLLDFLCIRKHFLGRRRR

SEQ ID NO: 27696 - protein, 35 aa, Artificial Sequence
  Quasi-synthetic sequence derived from human genome
RWLNKLMKLLQRLPNSVVRRLHRERYKKPSWLTPV

SEQ ID NO: 27697 - protein, 35 aa, Artificial Sequence
  Quasi-synthetic sequence derived from human genome
MVLKTLTKPVTLSRSKINKTKVLKMIFVHLIIFCF

SEQ ID NO: 27698 - protein, 35 aa, Artificial Sequence
  Quasi-synthetic sequence derived from human genome
LRYYYNKRILHKTKGKRFTYKFNFNKLVMPNYPFI

SEQ ID NO: 27699 - protein, 35 aa, Artificial Sequence
  Quasi-synthetic sequence derived from human genome
VGIAGALFILGALYSIKVMNRRRRNGFKRHKRKQR

SEQ ID NO: 27700 - protein, 35 aa, Artificial Sequence
  Quasi-synthetic sequence derived from human genome
KMRKTIGGVALWRQQICAIARVRLLKLKHERKALL

SEQ ID NO: 27701 - protein, 35 aa, Artificial Sequence
  Quasi-synthetic sequence derived from human genome
TAIAAAIALLALTALLLVAMICRRRRRRKKARGPP

SEQ ID NO: 27702 - protein, 35 aa, Artificial Sequence
  Quasi-synthetic sequence derived from human genome
SWKRYQPCWVLMVSVLLHHWKALKKVNMKLLVNIR

SEQ ID NO: 27703 - protein, 35 aa, Artificial Sequence
  Quasi-synthetic sequence derived from human genome
IFPKQKYLSKKTTKRKRGYIKNKLVFKKGKKISKK

SEQ ID NO: 27704 - protein, 35 aa, Artificial Sequence
  Quasi-synthetic sequence derived from human genome
KDKPVSFHKKKIFWSHRNSFPHLLYRLLFPRLMLL

SEQ ID NO: 27705 - protein, 35 aa, Artificial Sequence
  Quasi-synthetic sequence derived from human genome
FRVAKKRAPKVLGTTLVVGLLAGVGYFAFMLFRKR

SEQ ID NO: 27706 - protein, 35 aa, Artificial Sequence
  Quasi-synthetic sequence derived from human genome
AKFRRRTCIILALFILFIFSLMMGLKMLRPNTATF

SEQ ID NO: 27707 - protein, 35 aa, Artificial Sequence
  Quasi-synthetic sequence derived from human genome
WRRYRAKKYLCKVKAACKIQAWYRCWRAHKEYLAI

SEQ ID NO: 27708 - protein, 35 aa, Artificial Sequence
  Quasi-synthetic sequence derived from human genome
TFWRNKKSNKVLPMRRVLRKRPSPAPRTIRIEWLK

SEQ ID NO: 27709 - protein, 35 aa, Artificial Sequence
  Quasi-synthetic sequence derived from human genome
FKRAFVRILGCQCRGRGRRRRRRRRRLGGCAYTYR

SEQ ID NO: 27710 - protein, 35 aa, Artificial Sequence
  Quasi-synthetic sequence derived from human genome
WPRRPGRRWPASPLGMKVFRRKALVLCAGYALLLV

SEQ ID NO: 27711 - protein, 35 aa, Artificial Sequence
  Quasi-synthetic sequence derived from human genome
KYHSLPIIIKGSVGGLLVLIVILVILFKCGFFKRK

SEQ ID NO: 27712 - protein, 35 aa, Artificial Sequence
  Quasi-synthetic sequence derived from human genome
YNLVSANFRHIFLATLACLCPVWRRRRKRPAFSRK

SEQ ID NO: 27713 - protein, 35 aa, Artificial Sequence
  Quasi-synthetic sequence derived from human genome
LRLLRIFKITKYWASLRNLVVSLMSSMKSIISLLF

SEQ ID NO: 27714 - protein, 35 aa, Artificial Sequence
  Quasi-synthetic sequence derived from human genome
SLALTWALNYRTGVRLRGAILTMAFKKILKLKNIK

SEQ ID NO: 27715 - protein, 35 aa, Artificial Sequence
  Quasi-synthetic sequence derived from human genome
RKRPLTLLQRAGLLLLLGLLGFLALLALMSRLGRA

SEQ ID NO: 27716 - protein, 35 aa, Artificial Sequence
  Quasi-synthetic sequence derived from human genome
CPCRARLAFRNLGALLPRLHQLCCRMPRTLRRLFV

SEQ ID NO: 27717 - protein, 35 aa, Artificial Sequence
  Quasi-synthetic sequence derived from human genome
LGKKVLNLLKGAFPARLKKVLIVGAPIWFRVPYSI

SEQ ID NO: 27718 - protein, 35 aa, Artificial Sequence
  Quasi-synthetic sequence derived from human genome
YARAWLARRRFQSIRRFVLNIQLTYRVQRLQKKLE

SEQ ID NO: 27719 - protein, 35 aa, Artificial Sequence
  Quasi-synthetic sequence derived from human genome
MLPCTTRLKSMLRLLLVKKPSVRSLALKLLAFHLT

SEQ ID NO: 27720 - protein, 35 aa, Artificial Sequence
  Quasi-synthetic sequence derived from human genome
SLFRKWKAFSVWRKNVRSKKITGCQKSLQKNLFIV

SEQ ID NO: 27721 - protein, 35 aa, Artificial Sequence
  Quasi-synthetic sequence derived from human genome
RGPHLLNALNSYKSRFLCGKEIKKKKCIFRLRIRV

SEQ ID NO: 27722 - protein, 35 aa, Artificial Sequence
  Quasi-synthetic sequence derived from human genome
RRFRRWLNRYSYTVLSSWPERALISLKNRSRFLVR

SEQ ID NO: 27723 - protein, 35 aa, Artificial Sequence
  Quasi-synthetic sequence derived from human genome
LFRKPQRSFFGKLLREFRLVAADRRSWKILLFGVI

SEQ ID NO: 27724 - protein, 35 aa, Artificial Sequence
  Quasi-synthetic sequence derived from human genome
CSILFLTCISVHRCLGVLRPLRSLRWGRARYARRV

SEQ ID NO: 27725 - protein, 35 aa, Artificial Sequence
  Quasi-synthetic sequence derived from human genome
ILHISVMGGLIALLLLLLVFTVALYAQRRWQKRRR

SEQ ID NO: 27726 - protein, 35 aa, Artificial Sequence
  Quasi-synthetic sequence derived from human genome
FLVPVLIITACYLTIVCKLQRNRLAKTKKPFKIIV

SEQ ID NO: 27727 - protein, 35 aa, Artificial Sequence
  Quasi-synthetic sequence derived from human genome
PFKCLYYLIWKNYKKYIIIAFILIILIIFLVLFIY

SEQ ID NO: 27728 - protein, 35 aa, Artificial Sequence
  Quasi-synthetic sequence derived from human genome
LLRKYRRELQLRKKCHNELVRLKGNIRVIARVRPV

SEQ ID NO: 27729 - protein, 35 aa, Artificial Sequence
  Quasi-synthetic sequence derived from human genome
LLKIANFSNLIFLHLKRRVKSVVLVILLGPLLFLV

SEQ ID NO: 27730 - protein, 35 aa, Artificial Sequence
  Quasi-synthetic sequence derived from human genome
RPARFSFRLRPVFNASVQFLHCQLSRCRRLRGVRR

SEQ ID NO: 27731 - protein, 35 aa, Artificial Sequence
  Quasi-synthetic sequence derived from human genome
RRWKKKQLRRPSLLLLGCCSFGIMAPSLWKGLVGI

SEQ ID NO: 27732 - protein, 35 aa, Artificial Sequence
  Quasi-synthetic sequence derived from human genome
RRLRRAARRQVLSGHLPFCRFRLRYPSLSPSAFWV

SEQ ID NO: 27733 - protein, 35 aa, Artificial Sequence
  Quasi-synthetic sequence derived from human genome
RALLALRTRHIKAAGGIERFRARGGLRPLLALLRR

SEQ ID NO: 27734 - protein, 35 aa, Artificial Sequence
  Quasi-synthetic sequence derived from human genome
LIFLHLKRRVKSVILVMLLGPLLFLACQLFVINMK

SEQ ID NO: 27735 - protein, 35 aa, Artificial Sequence
  Quasi-synthetic sequence derived from human genome
KIQSWFRGCQVRAYIRHLNRIVTIIQKWWRSFLGR

SEQ ID NO: 27736 - protein, 35 aa, Artificial Sequence
  Quasi-synthetic sequence derived from human genome
RVITGTMALLFSFFFIIFIVFISRKCCPPTLRRIR

SEQ ID NO: 27737 - protein, 35 aa, Artificial Sequence
  Quasi-synthetic sequence derived from human genome
LLRSARRRRRGRTDGRRFLLRRAVPGHLGLARARV

SEQ ID NO: 27738 - protein, 35 aa, Artificial Sequence
  Quasi-synthetic sequence derived from human genome
ALLALALVGVLILFMFRRLRQFRQAQPTPQYRFRK

SEQ ID NO: 27739 - protein, 35 aa, Artificial Sequence
  Quasi-synthetic sequence derived from human genome
WKSAFVATLPLLLVLAALALGVLRKQRRSREKLRK

SEQ ID NO: 27740 - protein, 35 aa, Artificial Sequence
  Quasi-synthetic sequence derived from human genome
RWGQAISKSKLSRRWRRWNRFNRRRCRAAVKSVTF

SEQ ID NO: 27741 - protein, 35 aa, Artificial Sequence
  Quasi-synthetic sequence derived from human genome
YLGRAFFGLKVALIFPVLVLLTVFIFVVRKKSHGK

SEQ ID NO: 27742 - protein, 35 aa, Artificial Sequence
  Quasi-synthetic sequence derived from human genome
KKLILKQALIVVLQWCFNHNFSVRLYALVALKKLW

SEQ ID NO: 27743 - protein, 35 aa, Artificial Sequence
  Quasi-synthetic sequence derived from human genome
RHPAWWFMSVKVKLKRKKRQKTPNRKLPRRGAPTL

SEQ ID NO: 27744 - protein, 35 aa, Artificial Sequence
  Quasi-synthetic sequence derived from human genome
PAWWFMSVKVKLKRKKRQKTPNRKLPRRGAPTLRP

SEQ ID NO: 27745 - protein, 35 aa, Artificial Sequence
  Quasi-synthetic sequence derived from human genome
RIGRILRLIKGAKGIRTLLFALMMSLPALFNIGLL

SEQ ID NO: 27746 - protein, 35 aa, Artificial Sequence
  Quasi-synthetic sequence derived from human genome
RYLRVKLTVRFRIPGLPGCILSFQLKVCFLPVMWL

SEQ ID NO: 27747 - protein, 35 aa, Artificial Sequence
  Quasi-synthetic sequence derived from human genome
RAPALRRLLPPLLLLLLSLPPRARAKYVRGNLSSK

SEQ ID NO: 27748 - protein, 35 aa, Artificial Sequence
  Quasi-synthetic sequence derived from human genome
KKPIRRRPRADVVVVRGKIRLYSPSGFFLILGVLI

SEQ ID NO: 27749 - protein, 35 aa, Artificial Sequence
  Quasi-synthetic sequence derived from human genome
NRYVGYFAQVKHLYNWNLPPRRILFIKRFIIYSIR

SEQ ID NO: 27750 - protein, 35 aa, Artificial Sequence
  Quasi-synthetic sequence derived from human genome
LGRVAQVLRLMRIFRILKLARHSTGLRSLGATLKY

SEQ ID NO: 27751 - protein, 35 aa, Artificial Sequence
  Quasi-synthetic sequence derived from human genome
LSLKLAKIILALKVSRKNLLNVCKLIFKISRNEKN

SEQ ID NO: 27752 - protein, 35 aa, Artificial Sequence
  Quasi-synthetic sequence derived from human genome
RSYLAVWALSSLLVFLLMVAVYTRIFFYVRRRVQR

SEQ ID NO: 27753 - protein, 35 aa, Artificial Sequence
  Quasi-synthetic sequence derived from human genome
VRRIRSLQRSVQVLRAIVVMYVICWLPYHARRLMY

SEQ ID NO: 27754 - protein, 35 aa, Artificial Sequence
  Quasi-synthetic sequence derived from human genome
ISVKVMLKSIKTRLGRRVPAAPPALRRNLLLQAWK

SEQ ID NO: 27755 - protein, 35 aa, Artificial Sequence
  Quasi-synthetic sequence derived from human genome
RWLWRHVDLTLYTMRPKVMWHLLRRYMASRLHSLR

SEQ ID NO: 27756 - protein, 35 aa, Artificial Sequence
  Quasi-synthetic sequence derived from human genome
KLKEKQVRWKFIKRWKTRYFTLAGNQLLFQKGKSK

SEQ ID NO: 27757 - protein, 35 aa, Artificial Sequence
  Quasi-synthetic sequence derived from human genome
YRYRKEFLRQRRAAVTLQAWWRGYCNRRNFKLILV

SEQ ID NO: 27758 - protein, 35 aa, Artificial Sequence
  Quasi-synthetic sequence derived from human genome
RMPCPHRLGPVLKAGWLKKQRSIMKNWQQRWFVLR

SEQ ID NO: 27759 - protein, 35 aa, Artificial Sequence
  Quasi-synthetic sequence derived from human genome
MVILCRFRKLHCTRNFIHMNLFVSFMLRAISVFIK

SEQ ID NO: 27760 - protein, 35 aa, Artificial Sequence
  Quasi-synthetic sequence derived from human genome
LKLHRVLKVFLSRTAQRIPYMTGGRVMRMLAVILL

SEQ ID NO: 27761 - protein, 35 aa, Artificial Sequence
  Quasi-synthetic sequence derived from human genome
HVRWGRFAKGRGRRPVKTLELTRLLPLKFVKISIH

SEQ ID NO: 27762 - protein, 35 aa, Artificial Sequence
  Quasi-synthetic sequence derived from human genome
RRRCCRLCIWLLQTLVHLLQLGQVWRYLRALYLGL

SEQ ID NO: 27763 - protein, 35 aa, Artificial Sequence
  Quasi-synthetic sequence derived from human genome
FGNNFINLSFLRLFRAARLIKLLRQGYTIRILLWT

SEQ ID NO: 27764 - protein, 35 aa, Artificial Sequence
  Quasi-synthetic sequence derived from human genome
RTSVSVIIALRRAVKRHRERRERQKRVFRMSLLII

SEQ ID NO: 27765 - protein, 35 aa, Artificial Sequence
  Quasi-synthetic sequence derived from human genome
VILKEEFRGVIIKQGCLLKQGHRRKNWKVRKFILR

SEQ ID NO: 27766 - protein, 35 aa, Artificial Sequence
  Quasi-synthetic sequence derived from human genome
KRPKKGLATAKQRLGRILKIHRNGKLLLRQVIVQA

SEQ ID NO: 27767 - protein, 35 aa, Artificial Sequence
  Quasi-synthetic sequence derived from human genome
RLRNAKIYVERAVKQKKIFTIQGCYPVIRCLLRRR

SEQ ID NO: 27768 - protein, 35 aa, Artificial Sequence
  Quasi-synthetic sequence derived from human genome
HFRARFRRLWPCGRRRRHRARRALRRVRPASSGPP

SEQ ID NO: 27769 - protein, 35 aa, Artificial Sequence
  Quasi-synthetic sequence derived from human genome
IRKLRHRLSNFPRLPGILAPETVLLPFCYKVFRKK

SEQ ID NO: 27770 - protein, 35 aa, Artificial Sequence
  Quasi-synthetic sequence derived from human genome
MRRTRRPRFVLMNKMDDLNLHYRFLNWRRRIREIR

SEQ ID NO: 27771 - protein, 35 aa, Artificial Sequence
  Quasi-synthetic sequence derived from human genome
VLRVLRLLRTLRPLRVISRAPGLKLVVETLISSLK

SEQ ID NO: 27772 - protein, 35 aa, Artificial Sequence
  Quasi-synthetic sequence derived from human genome
AKICAFLLRKKRFGQWTKLLCVIKDTKLLCYKSSK

SEQ ID NO: 27773 - protein, 35 aa, Artificial Sequence
  Quasi-synthetic sequence derived from human genome
LGWMKKCYQMIDRRLRKNLKSFIIVHPSWFIRTIL

SEQ ID NO: 27774 - protein, 35 aa, Artificial Sequence
  Quasi-synthetic sequence derived from human genome
RRGFFTKLPPAERRYFKRVVLAARTKRGHLVLKSF

SEQ ID NO: 27775 - protein, 35 aa, Artificial Sequence
  Quasi-synthetic sequence derived from human genome
LLSRGRRRRMHVLRRRWDLGSLCRALLTRGLAALG

SEQ ID NO: 27776 - protein, 35 aa, Artificial Sequence
  Quasi-synthetic sequence derived from human genome
RKFGNRIKVLRSRIRFIHLVTGCVLGSSGKVLPKW

SEQ ID NO: 27777 - protein, 35 aa, Artificial Sequence
  Quasi-synthetic sequence derived from human genome
YLRRRLVPRYRLQLLGIACMVICTRFISKEILTIR

SEQ ID NO: 27778 - protein, 35 aa, Artificial Sequence
  Quasi-synthetic sequence derived from human genome
KKKWKKTCCLPSFVIFLFIIGCIISGITLLAIFRV

SEQ ID NO: 27779 - protein, 35 aa, Artificial Sequence
  Quasi-synthetic sequence derived from human genome
RYLARGCARRARGRWEGSAPRRLLLALHRRLRGLR

SEQ ID NO: 27780 - protein, 35 aa, Artificial Sequence
  Quasi-synthetic sequence derived from human genome
GLFALPFGRTAKPAHIAKVKMKFRFLGKLMAKAIM

SEQ ID NO: 27781 - protein, 35 aa, Artificial Sequence
  Quasi-synthetic sequence derived from human genome
FLLKFIRKMTSRHWCAVPILFLSKALANVPRHKAL

SEQ ID NO: 27782 - protein, 35 aa, Artificial Sequence
  Quasi-synthetic sequence derived from human genome
KWAKKSHMTWAHARLCFLLGRLSIRKVKLSQARVY

SEQ ID NO: 27783 - protein, 35 aa, Artificial Sequence
  Quasi-synthetic sequence derived from human genome
PPKRRLLPRVRLLPLLLALAVGSAFYTIWSGWHRR

SEQ ID NO: 27784 - protein, 35 aa, Artificial Sequence
  Quasi-synthetic sequence derived from human genome
FIARKLQKNLKTGSFLNRLGKLLLHLFMVLCLTLF

SEQ ID NO: 27785 - protein, 35 aa, Artificial Sequence
  Quasi-synthetic sequence derived from human genome
QRCYRKYKQLTWIALKFALYKKMTQAAILIQSKFR

SEQ ID NO: 27786 - protein, 35 aa, Artificial Sequence
  Quasi-synthetic sequence derived from human genome
RLLLVHGRWSYVRICKFLRYFFYKSMASMMVQVWF

SEQ ID NO: 27787 - protein, 35 aa, Artificial Sequence
  Quasi-synthetic sequence derived from human genome
RYLTRRRRIEIANALCLTERQIKIWFQNRRMKWKK

SEQ ID NO: 27788 - protein, 35 aa, Artificial Sequence
  Quasi-synthetic sequence derived from human genome
RYLTRRRRIEIAHTLCLSERQIKIWFQNRRMKWKK

SEQ ID NO: 27789 - protein, 35 aa, Artificial Sequence
  Quasi-synthetic sequence derived from human genome
KWKNFKGLKLQWRDKIRLNNAIWRAWYMQYLEKRK

SEQ ID NO: 27790 - protein, 35 aa, Artificial Sequence
  Quasi-synthetic sequence derived from human genome
WRGRYGRRRPFIWALSLGILLSLFLIPRAGWLAGL

SEQ ID NO: 27791 - protein, 35 aa, Artificial Sequence
  Quasi-synthetic sequence derived from human genome
IIRLMLKYQKILWKVPSFLITQVRRMNEATMLLKK

SEQ ID NO: 27792 - protein, 35 aa, Artificial Sequence
  Quasi-synthetic sequence derived from human genome
RVKFLNYLSRNFYTLRFLALFLAFAINFILLFYKV

SEQ ID NO: 27793 - protein, 35 aa, Artificial Sequence
  Quasi-synthetic sequence derived from human genome
KMRRYKLFLMFCMAGLCLISFLHFFKTLSYVTFPR

SEQ ID NO: 27794 - protein, 35 aa, Artificial Sequence
  Quasi-synthetic sequence derived from human genome
CLLAAGFVVYLKRKTLIRLLFTNKKTTIEKLRCVR

SEQ ID NO: 27795 - protein, 35 aa, Artificial Sequence
  Quasi-synthetic sequence derived from human genome
RRVRSYGKRRPARTILRAFLEKARQTPHKPFLLFR

SEQ ID NO: 27796 - protein, 35 aa, Artificial Sequence
  Quasi-synthetic sequence derived from human genome
RLIRKMFSFKVSRWMGLACFRSLAASSPSIRQKKL

SEQ ID NO: 27797 - protein, 35 aa, Artificial Sequence
  Quasi-synthetic sequence derived from human genome
LWRLPPILIIHLKRFQFVNGRWIKSQKIVKFPRES

SEQ ID NO: 27798 - protein, 35 aa, Artificial Sequence
  Quasi-synthetic sequence derived from human genome
ISFGIHSSAISVVKILRVLRVLRPLRAINRAKGLK

SEQ ID NO: 27799 - protein, 35 aa, Artificial Sequence
  Quasi-synthetic sequence derived from human genome
RFLLKRGLRNKRIGHFLFWFLRSEIAQSRHYQQRF

SEQ ID NO: 27800 - protein, 35 aa, Artificial Sequence
  Quasi-synthetic sequence derived from human genome
LRLLRIFKVTKYWSSLRNLVVSLLNSMKSIISLLF

SEQ ID NO: 27801 - protein, 35 aa, Artificial Sequence
  Quasi-synthetic sequence derived from human genome
RSYPYWRRLLVLCWYLPGWRAGRVTWLRLATWAGR

SEQ ID NO: 27802 - protein, 35 aa, Artificial Sequence
  Quasi-synthetic sequence derived from human genome
WMKRLAVFSQPIINKVKPQLLKTHFLPLMEKLKKK

SEQ ID NO: 27803 - protein, 35 aa, Artificial Sequence
  Quasi-synthetic sequence derived from human genome
RGLHSKAKYKKVQLVRLVGMMLLIFARKDQCRYIR

SEQ ID NO: 27804 - protein, 35 aa, Artificial Sequence
  Quasi-synthetic sequence derived from human genome
VKTVRFQTPGRFSWFCKRRRAFWHTPRLPTLPKRV

SEQ ID NO: 27805 - protein, 35 aa, Artificial Sequence
  Quasi-synthetic sequence derived from human genome
WKNWLGVKRQPLWTLVLILWPVIIFIILAITRTKF

SEQ ID NO: 27806 - protein, 35 aa, Artificial Sequence
  Quasi-synthetic sequence derived from human genome
LYNAMAVRIQRRWRGYRVRKYLFNYYYLKEYLKVV

SEQ ID NO: 27807 - protein, 35 aa, Artificial Sequence
  Quasi-synthetic sequence derived from human genome
WIVFLLLIVFYTAITKKIFKSHLKSSRNSTSVKKK

SEQ ID NO: 27808 - protein, 35 aa, Artificial Sequence
  Quasi-synthetic sequence derived from human genome
LLLLAFLQRRQRRRQDSRVVARSVRILVASFFLCW

SEQ ID NO: 27809 - protein, 35 aa, Artificial Sequence
  Quasi-synthetic sequence derived from human genome
YKACLPPSLRDLIQGLSFVTRRRIRRTVRRALRRV

SEQ ID NO: 27810 - protein, 35 aa, Artificial Sequence
  Quasi-synthetic sequence derived from human genome
RYLTRRRRIEIAHSLCLSERQIKIWFQNRRMKWKK

SEQ ID NO: 27811 - protein, 35 aa, Artificial Sequence
  Quasi-synthetic sequence derived from human genome
QKVKKIWQKQFRWPKNRLQILKFCKAREDLLKIQK

SEQ ID NO: 27812 - protein, 35 aa, Artificial Sequence
  Quasi-synthetic sequence derived from human genome
LRWFQHRRNRRRRKPQRNLLRNFLVQAFGGCFGRS

SEQ ID NO: 27813 - protein, 35 aa, Artificial Sequence
  Quasi-synthetic sequence derived from human genome
WRRRHCCFAKMTWNAKRSLFRTHLIGVLSLVFLFA

SEQ ID NO: 27814 - protein, 35 aa, Artificial Sequence
  Quasi-synthetic sequence derived from human genome
GLEIRMRRIVFAGVILFRLLGVILFRLLGVILFGR

SEQ ID NO: 27815 - protein, 35 aa, Artificial Sequence
  Quasi-synthetic sequence derived from human genome
WLRSPVQNFCYIFWKRYRFKLIAFMVISIIALMLF

SEQ ID NO: 27816 - protein, 35 aa, Artificial Sequence
  Quasi-synthetic sequence derived from human genome
IYLYNFLKRQKAPRSKLISVLKILYQIVPSHKLML

SEQ ID NO: 27817 - protein, 35 aa, Artificial Sequence
  Quasi-synthetic sequence derived from human genome
APFRLLWPILGGALSLTFVLGLLSGFLVWRRCRRR

SEQ ID NO: 27818 - protein, 35 aa, Artificial Sequence
  Quasi-synthetic sequence derived from human genome
VCIREKILLYKTHWMTPIFLKVVINTRRIKHHFKI

SEQ ID NO: 27819 - protein, 35 aa, Artificial Sequence
  Quasi-synthetic sequence derived from human genome
LRIWAAGCCCRYKGWRGRLKFARKPLCMLDIFVLI

SEQ ID NO: 27820 - protein, 35 aa, Artificial Sequence
  Quasi-synthetic sequence derived from human genome
KLSKRQLFFRKKLLHSSQMLRAVSLGQDRYRRRYW

SEQ ID NO: 27821 - protein, 35 aa, Artificial Sequence
  Quasi-synthetic sequence derived from human genome
VLSLSLAGALFLLAGLVAVALVVRKVKLRNLQKKR

SEQ ID NO: 27822 - protein, 35 aa, Artificial Sequence
  Quasi-synthetic sequence derived from human genome
GAQLLMVLRCLRPLRIFKLVPQMRKVVRELFSGFK

SEQ ID NO: 27823 - protein, 35 aa, Artificial Sequence
  Quasi-synthetic sequence derived from human genome
MLSLGVGILVGCLCLLLAVYFIARKIRKKRLENRK

SEQ ID NO: 27824 - protein, 35 aa, Artificial Sequence
  Quasi-synthetic sequence derived from human genome
LLGVARSLWMLLKLRQRLRSPTAPFTSPLPRGKRR

SEQ ID NO: 27825 - protein, 35 aa, Artificial Sequence
  Quasi-synthetic sequence derived from human genome
LRSVWNFLKRHKKKCIFLGTVLGGVYILGKYGQKK

SEQ ID NO: 27826 - protein, 35 aa, Artificial Sequence
  Quasi-synthetic sequence derived from human genome
KSKTKSKYASYLSFIKILLKRGGVRVSTKNLIKLF

SEQ ID NO: 27827 - protein, 35 aa, Artificial Sequence
  Quasi-synthetic sequence derived from human genome
APLWLRAKFQRLLFKLGCYIQKNCGKFLVVGLLIF

SEQ ID NO: 27828 - protein, 35 aa, Artificial Sequence
  Quasi-synthetic sequence derived from human genome
GAARHSRVRRAALRLLTYLSCRFGLARVHWAFKFF

SEQ ID NO: 27829 - protein, 35 aa, Artificial Sequence
  Quasi-synthetic sequence derived from human genome
WASRWLRRKLRARRKGGAPVHVRHMYSTRRPLRSM

SEQ ID NO: 27830 - protein, 35 aa, Artificial Sequence
  Quasi-synthetic sequence derived from human genome
KVKFDIRYIVLLRSVRPLRLFVYDVFWLRFSNRAF

SEQ ID NO: 27831 - protein, 35 aa, Artificial Sequence
  Quasi-synthetic sequence derived from human genome
VFQGFTKINAFNWAKVRKLSFKRKRFLIKLRPDAN

SEQ ID NO: 27832 - protein, 35 aa, Artificial Sequence
  Quasi-synthetic sequence derived from human genome
AVYRRRFVQQKRAAITLQHYFRTWQTRKQFLLYRK

SEQ ID NO: 27833 - protein, 35 aa, Artificial Sequence
  Quasi-synthetic sequence derived from human genome
IMKARLKGAQTGRNLLKKKSDALTLRFRQILKKII

SEQ ID NO: 27834 - protein, 35 aa, Artificial Sequence
  Quasi-synthetic sequence derived from human genome
RFKHLKKLLLVHGHWCYSRLARMVVYYLYKNVCYV

SEQ ID NO: 27835 - protein, 35 aa, Artificial Sequence
  Quasi-synthetic sequence derived from human genome
MLWKLLLRSQSCRLCSFRKMRSPPKYRPFLACFTY

SEQ ID NO: 27836 - protein, 35 aa, Artificial Sequence
  Quasi-synthetic sequence derived from human genome
LILLGIGIYALWKRSIQSIQKTLLFVITLYKLYKK

SEQ ID NO: 27837 - protein, 35 aa, Artificial Sequence
  Quasi-synthetic sequence derived from human genome
AVISKRGGKLCLLIRVANLRKSLLIGSHIYGKLLK

SEQ ID NO: 27838 - protein, 35 aa, Artificial Sequence
  Quasi-synthetic sequence derived from human genome
RQSLIEYKAAVTLQRAALKFLAKCRKKKKLFAPWR

SEQ ID NO: 27839 - protein, 35 aa, Artificial Sequence
  Quasi-synthetic sequence derived from human genome
KRLNIRKVIPYIASQFRKDKIWLRRTKPSKRQYQI

SEQ ID NO: 27840 - protein, 35 aa, Artificial Sequence
  Quasi-synthetic sequence derived from human genome
LNLNNEVVKMRKEVKRIRVLVIRKLVRSVGRLKSK

SEQ ID NO: 27841 - protein, 35 aa, Artificial Sequence
  Quasi-synthetic sequence derived from human genome
RYLTRRRRVEIAHALCLSERQIKIWFQNRRMKWKK

SEQ ID NO: 27842 - protein, 35 aa, Artificial Sequence
  Quasi-synthetic sequence derived from human genome
LWFQLCRYMNPRARKNCSQIALFRKYRFHFFCSMR

SEQ ID NO: 27843 - protein, 35 aa, Artificial Sequence
  Quasi-synthetic sequence derived from human genome
RALGGRAVRSRRAIAVLSRWPAFPAFRAFLTFLYR

SEQ ID NO: 27844 - protein, 35 aa, Artificial Sequence
  Quasi-synthetic sequence derived from human genome
FLKIANFSNSIFLYLKWRVKKVVLVLLLVTSVFLF

SEQ ID NO: 27845 - protein, 35 aa, Artificial Sequence
  Quasi-synthetic sequence derived from human genome
RLKILETLKLLMQHTWPRVSCRLVVLLKALLKLIC

SEQ ID NO: 27846 - protein, 35 aa, Artificial Sequence
  Quasi-synthetic sequence derived from human genome
LVIRAAVAGFFAVLFLWRSFRSVTSRLYVRREKKF

SEQ ID NO: 27847 - protein, 35 aa, Artificial Sequence
  Quasi-synthetic sequence derived from human genome
KNMLVQESQQFKHNFLLLFMKLRWFLKRWRQGKVL

SEQ ID NO: 27848 - protein, 35 aa, Artificial Sequence
  Quasi-synthetic sequence derived from human genome
LFKILASFYISLVIFYGLICMYTLWWMLRRSLKKY

SEQ ID NO: 27849 - protein, 35 aa, Artificial Sequence
  Quasi-synthetic sequence derived from human genome
AFFRLFRVMRLIKLLSRAEGVRTLLWTFIKSFQAL

SEQ ID NO: 27850 - protein, 35 aa, Artificial Sequence
  Quasi-synthetic sequence derived from human genome
FRIKRFLAKKQKQNRPIPQWIRMKTGNKIRYNSKR

SEQ ID NO: 27851 - protein, 35 aa, Artificial Sequence
  Quasi-synthetic sequence derived from human genome
KLKYLAFLRKRMNTNPSRGPYHFRAPSRIFWRTVR

SEQ ID NO: 27852 - protein, 35 aa, Artificial Sequence
  Quasi-synthetic sequence derived from human genome
LTLLIALLSINGFAYFIRRRINKIQLIKGPNRILL

SEQ ID NO: 27853 - protein, 35 aa, Artificial Sequence
  Quasi-synthetic sequence derived from human genome
GWRFLRIVCKTARRDLFGLSVLIRVRLELRRHQRA

SEQ ID NO: 27854 - protein, 35 aa, Artificial Sequence
  Quasi-synthetic sequence derived from human genome
KLFLNLATLLPFCVCLMSFFLLILSLRRHIRRMQL

SEQ ID NO: 27855 - protein, 35 aa, Artificial Sequence
  Quasi-synthetic sequence derived from human genome
RIMAKDLVRTRRYVRKFVLMRANIQAVSLKIQTLK

SEQ ID NO: 27856 - protein, 35 aa, Artificial Sequence
  Quasi-synthetic sequence derived from human genome
WLLLVLVLVLLVSPRGCRARRGLRGLLMAHSQRLL

SEQ ID NO: 27857 - protein, 35 aa, Artificial Sequence
  Quasi-synthetic sequence derived from human genome
LVLPLLIMVICYSGILKTLLRCRNEKKRHRAVRVI

SEQ ID NO: 27858 - protein, 35 aa, Artificial Sequence
  Quasi-synthetic sequence derived from human genome
NKTKMAFLLVGICFLCKLCTIIFTTIAFFIYKRRL

SEQ ID NO: 27859 - protein, 35 aa, Artificial Sequence
  Quasi-synthetic sequence derived from human genome
VLLRVFVEGWTHLVRLLRLIILIRIFHLLHQKRQL

SEQ ID NO: 27860 - protein, 35 aa, Artificial Sequence
  Quasi-synthetic sequence derived from human genome
RKKFMITPKLIRMVTVMQAHVRGWLERKRLQRVMT

SEQ ID NO: 27861 - protein, 35 aa, Artificial Sequence
  Quasi-synthetic sequence derived from human genome
LILRSQLIVLLKHKVFVERSNLGLVQRRLRLKDFR

SEQ ID NO: 27862 - protein, 35 aa, Artificial Sequence
  Quasi-synthetic sequence derived from human genome
IIVIFCYLRIWILVLQVRQRVKPDRKPKLKPQDFR

SEQ ID NO: 27863 - protein, 35 aa, Artificial Sequence
  Quasi-synthetic sequence derived from human genome
RRKEKMFRFFIRRMVKAQSFYWVVLCVVALNTLCV

SEQ ID NO: 27864 - protein, 35 aa, Artificial Sequence
  Quasi-synthetic sequence derived from human genome
PRRPRPRLARPRAGQKPWLLVIRSMERVMYVMLII

SEQ ID NO: 27865 - protein, 35 aa, Artificial Sequence
  Quasi-synthetic sequence derived from human genome
WVRMWCVRQRYCRLLNAVRIIQVYWRWHSCHSRVF

SEQ ID NO: 27866 - protein, 35 aa, Artificial Sequence
  Quasi-synthetic sequence derived from human genome
LKVFYKFLNSNRHTIRHTGKKCFKCKKCVKSFCIR

SEQ ID NO: 27867 - protein, 35 aa, Artificial Sequence
  Quasi-synthetic sequence derived from human genome
RLLCSRLCQQLRSKRKFFGTVPISRLHRRVVITGI

SEQ ID NO: 27868 - protein, 35 aa, Artificial Sequence
  Quasi-synthetic sequence derived from human genome
LLKIANFSNFIFLHLKRRVKSVILVMLLGPLLFLA

SEQ ID NO: 27869 - protein, 35 aa, Artificial Sequence
  Quasi-synthetic sequence derived from human genome
FRDFFFSRGRFSSGFRRTLILSSGFRLVKKKLYSL

SEQ ID NO: 27870 - protein, 35 aa, Artificial Sequence
  Quasi-synthetic sequence derived from human genome
ITLRFFASVLIRRIHKVDIPSIITKKLLKAAMKHI

SEQ ID NO: 27871 - protein, 35 aa, Artificial Sequence
  Quasi-synthetic sequence derived from human genome
KSRWVIVGLFVSILILSLVFASRLRPASRAPLLFR

SEQ ID NO: 27872 - protein, 35 aa, Artificial Sequence
  Quasi-synthetic sequence derived from human genome
KILTRGERLDGFGLLLKKIMAILIKRFHHTRRNWK

SEQ ID NO: 27873 - protein, 35 aa, Artificial Sequence
  Quasi-synthetic sequence derived from human genome
MKKLFLQLIAEFKRLGSSVIYANFNRIILCTKKRR

SEQ ID NO: 27874 - protein, 35 aa, Artificial Sequence
  Quasi-synthetic sequence derived from human genome
RSKKIFLSKLIVCFLSTWLPFVLLQVIIVLLKVQI

SEQ ID NO: 27875 - protein, 35 aa, Artificial Sequence
  Quasi-synthetic sequence derived from human genome
LKMIPRIDYDRIKARMSLKDWFAKRKKFKRPPQRL

SEQ ID NO: 27876 - protein, 35 aa, Artificial Sequence
  Quasi-synthetic sequence derived from human genome
MKLFRSQRNLYISGFSLFFWLVLRRLVTLITQLAK

SEQ ID NO: 27877 - protein, 35 aa, Artificial Sequence
  Quasi-synthetic sequence derived from human genome
KMKFRFLGKLMAKAIMDFRLVDLPLGLPFYKWMLR

SEQ ID NO: 27878 - protein, 35 aa, Artificial Sequence
  Quasi-synthetic sequence derived from human genome
LQRDFLKQRPTKLKSLIRLVKHWYQNCKKKLGKLP

SEQ ID NO: 27879 - protein, 35 aa, Artificial Sequence
  Quasi-synthetic sequence derived from human genome
MRLTRKRLCSFLIALYCLFSLYAAYHVFFGRRRQA

SEQ ID NO: 27880 - protein, 35 aa, Artificial Sequence
  Quasi-synthetic sequence derived from human genome
KAFKIRKHYLHLRATVVSIQRRYRKLTAVRTQAVI

SEQ ID NO: 27881 - protein, 35 aa, Artificial Sequence
  Quasi-synthetic sequence derived from human genome
FFAVLFFLWRSFRSVRSRLYVGREKKLALMLSGLI

SEQ ID NO: 27882 - protein, 35 aa, Artificial Sequence
  Quasi-synthetic sequence derived from human genome
KLFLRFQQNLLGFLLPLLAMIFFYSRIGCVLVRLR

SEQ ID NO: 27883 - protein, 35 aa, Artificial Sequence
  Quasi-synthetic sequence derived from human genome
KKGVYLSHTGGKMLFWVLGLLILCGFLWTRKGKLK

SEQ ID NO: 27884 - protein, 35 aa, Artificial Sequence
  Quasi-synthetic sequence derived from human genome
LRKRGLLVAAVLFITGIIILTSGKCRQLSRLCRNR

SEQ ID NO: 27885 - protein, 35 aa, Artificial Sequence
  Quasi-synthetic sequence derived from human genome
VKGKKCIVLVTELMTSGTLKTYLKRFKVMKIKVLR

SEQ ID NO: 27886 - protein, 35 aa, Artificial Sequence
  Quasi-synthetic sequence derived from human genome
LAPWPRPPPRRFSPPRRMLPPPPMWRRSPPRMRRR

SEQ ID NO: 27887 - protein, 35 aa, Artificial Sequence
  Quasi-synthetic sequence derived from human genome
LIAFIFLIIKSYRKYRRERLPISPGPLLRWVPLLS

SEQ ID NO: 27888 - protein, 35 aa, Artificial Sequence
  Quasi-synthetic sequence derived from human genome
GGVAMYAVSWCFMFSIWRFAWRKSIKKYHAWRSRR

SEQ ID NO: 27889 - protein, 35 aa, Artificial Sequence
  Quasi-synthetic sequence derived from human genome
PRLRSPALARRLLLAVWLAALLLAVPAAVYRHLWR

SEQ ID NO: 27890 - protein, 35 aa, Artificial Sequence
  Quasi-synthetic sequence derived from human genome
KKRRKVTRKEPPVIIKYIIINRFKGEKNMLVKLGK

SEQ ID NO: 27891 - protein, 35 aa, Artificial Sequence
  Quasi-synthetic sequence derived from human genome
LYLVVAVAAVSCVFLAFVIVLLVLRLRRWHKSRLL

SEQ ID NO: 27892 - protein, 35 aa, Artificial Sequence
  Quasi-synthetic sequence derived from human genome
LWLVLVAVGAGLLLLGLIILLLWKCGFFKRARTRA

SEQ ID NO: 27893 - protein, 35 aa, Artificial Sequence
  Quasi-synthetic sequence derived from human genome
IYLIIGICGGGSLLMVFVALLVFYITKRKKQRSRR

SEQ ID NO: 27894 - protein, 35 aa, Artificial Sequence
  Quasi-synthetic sequence derived from human genome
WVYQRRGLVHLCCSKLVNYLTPIKYLRKSLKIIYL

SEQ ID NO: 27895 - protein, 35 aa, Artificial Sequence
  Quasi-synthetic sequence derived from human genome
GYRPGPVRRRGKVELIKFVRVQWRRPQVEWRRRRW

SEQ ID NO: 27896 - protein, 35 aa, Artificial Sequence
  Quasi-synthetic sequence derived from human genome
VLIVQRWIRGFLVRKNLSPVFFHKKKQQEKIIRGY

SEQ ID NO: 27897 - protein, 35 aa, Artificial Sequence
  Quasi-synthetic sequence derived from human genome
ALVPVMKKLVPVRRRAWGQLCLPPQRLRVTRHPLI

SEQ ID NO: 27898 - protein, 35 aa, Artificial Sequence
  Quasi-synthetic sequence derived from human genome
LLLLKLHLWPQLRWLPADLAFAVRALCCKRALRAR

SEQ ID NO: 27899 - protein, 35 aa, Artificial Sequence
  Quasi-synthetic sequence derived from human genome
LYLVVAVAAVSCVFLAFVILLLALRLRRWHKSRLL

SEQ ID NO: 27900 - protein, 35 aa, Artificial Sequence
  Quasi-synthetic sequence derived from human genome
ILGSVWLAYKTPKLLRTARGRRIKKCATQLCRRCK

SEQ ID NO: 27901 - protein, 35 aa, Artificial Sequence
  Quasi-synthetic sequence derived from human genome
ARKKLKKFTTLEIVLSVLLLVLFIISIVLIVLLAK

SEQ ID NO: 27902 - protein, 35 aa, Artificial Sequence
  Quasi-synthetic sequence derived from human genome
KKINKLFCFNFLVQCFRGKSKPSKCQIRKKVKNHI

SEQ ID NO: 27903 - protein, 35 aa, Artificial Sequence
  Quasi-synthetic sequence derived from human genome
VLKLPWTQVGFSLLFLYLGSGGWRFIRVFIKTIRR

SEQ ID NO: 27904 - protein, 35 aa, Artificial Sequence
  Quasi-synthetic sequence derived from human genome
KFKHLKKLLLAHGHLYYVRIAHLVQYFFYKNLCFI

SEQ ID NO: 27905 - protein, 35 aa, Artificial Sequence
  Quasi-synthetic sequence derived from human genome
GYFCVIFLLNVSMFIVVLVQLCRIKKKKQLGAQRK

SEQ ID NO: 27906 - protein, 35 aa, Artificial Sequence
  Quasi-synthetic sequence derived from human genome
KSIYFLGHIFFLSLLFILPYIHKAMVPRKEKLKKM

SEQ ID NO: 27907 - protein, 35 aa, Artificial Sequence
  Quasi-synthetic sequence derived from human genome
KNPLKNLRIMLKLNPYAKTMRRNTILRQARNHKLR

SEQ ID NO: 27908 - protein, 35 aa, Artificial Sequence
  Quasi-synthetic sequence derived from human genome
HTITLQPSSFRNLRLPKRLRVVYFLARTRLAQRLI

SEQ ID NO: 27909 - protein, 35 aa, Artificial Sequence
  Quasi-synthetic sequence derived from human genome
RMKKSMWGQFWSAHQRFFKYLCIASKVKRVVQLAR

SEQ ID NO: 27910 - protein, 35 aa, Artificial Sequence
  Quasi-synthetic sequence derived from human genome
RRVLCYPLYRHFKLVMKAYRDTIKILQLGKSAVLK

SEQ ID NO: 27911 - protein, 35 aa, Artificial Sequence
  Quasi-synthetic sequence derived from human genome
RFKKGKIVLLFSLLCWVLFNLGIGFVKPATLRCVP

SEQ ID NO: 27912 - protein, 35 aa, Artificial Sequence
  Quasi-synthetic sequence derived from human genome
RFKVMKAKKMRNRIIKNEVKKLQKAALLKASPKKA

SEQ ID NO: 27913 - protein, 35 aa, Artificial Sequence
  Quasi-synthetic sequence derived from human genome
PGARRRQRGRLMRRLVRRLRRWGLLPRTNTPARAS

SEQ ID NO: 27914 - protein, 35 aa, Artificial Sequence
  Quasi-synthetic sequence derived from human genome
RYKIRHTKKKTFKCMKCSKSFFMLSHLIQHKRIHT

SEQ ID NO: 27915 - protein, 35 aa, Artificial Sequence
  Quasi-synthetic sequence derived from human genome
FFPYRLVGLAVGLYAGIKFFLIDFIFKRCPRLRAK

SEQ ID NO: 27916 - protein, 35 aa, Artificial Sequence
  Quasi-synthetic sequence derived from human genome
LGIFVFFRKLTTIFPLNWKYRKALSLGCQRVTLHK

SEQ ID NO: 27917 - protein, 35 aa, Artificial Sequence
  Quasi-synthetic sequence derived from human genome
RLLWRRLKPLILGKLLFAPDTPFTRKLMAQVNRTF

SEQ ID NO: 27918 - protein, 35 aa, Artificial Sequence
  Quasi-synthetic sequence derived from human genome
RRHAMRGRLFYTAKAKKTGKVMIRIHPCARLCFCK

SEQ ID NO: 27919 - protein, 35 aa, Artificial Sequence
  Quasi-synthetic sequence derived from human genome
LKIKLAVRMDKPAHMKHSGYLYALGQKVWKRWKKR

SEQ ID NO: 27920 - protein, 35 aa, Artificial Sequence
  Quasi-synthetic sequence derived from human genome
LRAAKWLHFPQLALRRRLGQLSCMSRPALKLRSWP

SEQ ID NO: 27921 - protein, 35 aa, Artificial Sequence
  Quasi-synthetic sequence derived from human genome
LGTVAWRRAWPRRRRRLQQVGTVAKLWIYPVKSCK

SEQ ID NO: 27922 - protein, 35 aa, Artificial Sequence
  Quasi-synthetic sequence derived from human genome
IRFPGRRGYGRLRPRARSLSKASTAINWLTKKFLL

SEQ ID NO: 27923 - protein, 35 aa, Artificial Sequence
  Quasi-synthetic sequence derived from human genome
ISFGIQSSAINVVKILRVLRVLRPLRAINRAKGLK

SEQ ID NO: 27924 - protein, 35 aa, Artificial Sequence
  Quasi-synthetic sequence derived from human genome
RKFKFRKMHYDRFVIFLMPHIGCIVMALSKYLMMF

SEQ ID NO: 27925 - protein, 35 aa, Artificial Sequence
  Quasi-synthetic sequence derived from human genome
TFVIVVALGILSWTVICCCKRQKGKPKRKSKYKIL

SEQ ID NO: 27926 - protein, 35 aa, Artificial Sequence
  Quasi-synthetic sequence derived from human genome
LPRDSCPVRIRNRCVMTSRPRGVKRRWRLSRIVFR

SEQ ID NO: 27927 - protein, 35 aa, Artificial Sequence
  Quasi-synthetic sequence derived from human genome
LKLLKSHRVLKWKADKSLSYNSRFWKNLLYLMPAK

SEQ ID NO: 27928 - protein, 35 aa, Artificial Sequence
  Quasi-synthetic sequence derived from human genome
ISLCARVRKLRSAGRCGKFHQVRRVMTILFLTMVI

SEQ ID NO: 27929 - protein, 35 aa, Artificial Sequence
  Quasi-synthetic sequence derived from human genome
VRKILLLQSWFRMVLERRHFLQMKRAAVTIQACWR

SEQ ID NO: 27930 - protein, 35 aa, Artificial Sequence
  Quasi-synthetic sequence derived from human genome
WVYQRRGLVHLCCSKLVNYLTPIKYLRKSLKIIYI

SEQ ID NO: 27931 - protein, 35 aa, Artificial Sequence
  Quasi-synthetic sequence derived from human genome
RYVAILHPFRAKLQSTRRRALRILGIVWGFSVLFS

SEQ ID NO: 27932 - protein, 35 aa, Artificial Sequence
  Quasi-synthetic sequence derived from human genome
FILILGNNKLRHASLKVIWKVMSILKGRKFQQHKQ

SEQ ID NO: 27933 - protein, 35 aa, Artificial Sequence
  Quasi-synthetic sequence derived from human genome
YRGKNPLLVPLLYDFRRMTARRRVNRKMGFHVIYK

SEQ ID NO: 27934 - protein, 35 aa, Artificial Sequence
  Quasi-synthetic sequence derived from human genome
LGVAVLVSILAGCLLNRRRAARRRRKRLRQDPPLI

SEQ ID NO: 27935 - protein, 35 aa, Artificial Sequence
  Quasi-synthetic sequence derived from human genome
HTGLLSVLAMFFLLVLILSSVFLFRLFKRRQGRIF

SEQ ID NO: 27936 - protein, 35 aa, Artificial Sequence
  Quasi-synthetic sequence derived from human genome
ILLALGALLVLQLIRRRRREHGALWLPPGFTRRPR

SEQ ID NO: 27937 - protein, 35 aa, Artificial Sequence
  Quasi-synthetic sequence derived from human genome
LKIKLAVRMDKPQNMKHSGYLWAIGKNVWKRWKKR

SEQ ID NO: 27938 - protein, 35 aa, Artificial Sequence
  Quasi-synthetic sequence derived from human genome
FRLLWIDTKIAARMLWRILNGHSLTRRERRQFLRI

SEQ ID NO: 27939 - protein, 35 aa, Artificial Sequence
  Quasi-synthetic sequence derived from human genome
RILRLIKGAKGIRTLLFALMMSLPALFNIGLLLFL

SEQ ID NO: 27940 - protein, 35 aa, Artificial Sequence
  Quasi-synthetic sequence derived from human genome
VVKGLMKKFIRCSTRVTVGTIKKFLSLKLKLPSSY

SEQ ID NO: 27941 - protein, 35 aa, Artificial Sequence
  Quasi-synthetic sequence derived from human genome
RTLARCPHCRKVSSIGRRYPRKRCICCFLLGLLLA

SEQ ID NO: 27942 - protein, 35 aa, Artificial Sequence
  Quasi-synthetic sequence derived from human genome
WVQIMMFKNMTPSPFLRFYLGKPSGKRRRRKSSFL

SEQ ID NO: 27943 - protein, 35 aa, Artificial Sequence
  Quasi-synthetic sequence derived from human genome
VKRKKNVLRLCCKKLKIFAMPMQDIKMILKMVQLD

SEQ ID NO: 27944 - protein, 35 aa, Artificial Sequence
  Quasi-synthetic sequence derived from human genome
WLIYKHTKLLKKIDHAKVRKHQRKFLQAIHQLRSV

SEQ ID NO: 27945 - protein, 35 aa, Artificial Sequence
  Quasi-synthetic sequence derived from human genome
IRGRILSGVVTKMKMQRTIVIRRDYLHYIRKYNRF

SEQ ID NO: 27946 - protein, 35 aa, Artificial Sequence
  Quasi-synthetic sequence derived from human genome
LLSATFNASFLLKLQKWTQKKEKGKKLSRMKLLLK

SEQ ID NO: 27947 - protein, 35 aa, Artificial Sequence
  Quasi-synthetic sequence derived from human genome
KLRLDKLRQSCVMVQKHMRGWLQRKKFLRERRAAL

SEQ ID NO: 27948 - protein, 35 aa, Artificial Sequence
  Quasi-synthetic sequence derived from human genome
DMGLWRMQVFAMARLRFLKLKRQTKVLLTLLLVFG

SEQ ID NO: 27949 - protein, 35 aa, Artificial Sequence
  Quasi-synthetic sequence derived from human genome
MIRKNKYRPDLRMAAIRRASAILRSQKPVMVKRKR

SEQ ID NO: 27950 - protein, 35 aa, Artificial Sequence
  Quasi-synthetic sequence derived from human genome
GLKVIQQNVHKFLQLRFWGWWKLYNKVKPLLNVAR

SEQ ID NO: 27951 - protein, 35 aa, Artificial Sequence
  Quasi-synthetic sequence derived from human genome
HLRIFRIPRRPRKLTLKGYRQHWVVFKETTLSYYK

SEQ ID NO: 27952 - protein, 35 aa, Artificial Sequence
  Quasi-synthetic sequence derived from human genome
IVKQGYVKMKSRKLGIYRRCWLVFRKSSSKGPQRL

SEQ ID NO: 27953 - protein, 35 aa, Artificial Sequence
  Quasi-synthetic sequence derived from human genome
WMARRHFQRLRDAAIVIQCAFRMLKARRELKALRI

SEQ ID NO: 27954 - protein, 35 aa, Artificial Sequence
  Quasi-synthetic sequence derived from human genome
KKKFYGPQRRKMMFMGFIRLGVWYNFFRAWNGGFS

SEQ ID NO: 27955 - protein, 35 aa, Artificial Sequence
  Quasi-synthetic sequence derived from human genome
FHRLKIKQILPTIYKRKNLSLFLSISLLIFWGSSL

SEQ ID NO: 27956 - protein, 35 aa, Artificial Sequence
  Quasi-synthetic sequence derived from human genome
RLAYIAHPKLGKRARARIAKGLRLCRPKAKAKAKA

SEQ ID NO: 27957 - protein, 35 aa, Artificial Sequence
  Quasi-synthetic sequence derived from human genome
FFRLFRVMRLVKLLSRGEGIRTLLWTFIKSFQALP

SEQ ID NO: 27958 - protein, 35 aa, Artificial Sequence
  Quasi-synthetic sequence derived from human genome
HKCAIIIQSYYRMHVQQKKWKIMKKAALLIQKYYR

SEQ ID NO: 27959 - protein, 35 aa, Artificial Sequence
  Quasi-synthetic sequence derived from human genome
LRKHIFWGMLLQSHTSVYKNKNKQLLGLRRITKLL

SEQ ID NO: 27960 - protein, 35 aa, Artificial Sequence
  Quasi-synthetic sequence derived from human genome
FIQKRKFQEIKNSTIKIQAMWRRYRAKKYLCKVKA

SEQ ID NO: 27961 - protein, 35 aa, Artificial Sequence
  Quasi-synthetic sequence derived from human genome
MRTQCLLGLRTFVAFAAKLWSFFIYLLRRQIRTVI

SEQ ID NO: 27962 - protein, 35 aa, Artificial Sequence
  Quasi-synthetic sequence derived from human genome
LWYLIKWIWTHLCKKKMRRKPESFGTIGVRTQHRR

SEQ ID NO: 27963 - protein, 35 aa, Artificial Sequence
  Quasi-synthetic sequence derived from human genome
IWNRLHQLKALKTRRPRSRVPLRIGILGCMAERLK

SEQ ID NO: 27964 - protein, 35 aa, Artificial Sequence
  Quasi-synthetic sequence derived from human genome
VRLFLKNYSKTRFGYRIKWRIICGNNSTVIFFHFL

SEQ ID NO: 27965 - protein, 35 aa, Artificial Sequence
  Quasi-synthetic sequence derived from human genome
RTKRKPSIKAARAKKIFGWGDFYFRVHTLKFSLLV

SEQ ID NO: 27966 - protein, 35 aa, Artificial Sequence
  Quasi-synthetic sequence derived from human genome
LLWIIKVSRAAIVFPMMVLALVFVRKLMDLLFTKR

SEQ ID NO: 27967 - protein, 35 aa, Artificial Sequence
  Quasi-synthetic sequence derived from human genome
LRKLPFRAFRTDARKIHTAPARTMFLLRPLPILLV

SEQ ID NO: 27968 - protein, 35 aa, Artificial Sequence
  Quasi-synthetic sequence derived from human genome
FKATKFLNLNLRYSFLKTASFFVRLGPMALAFKVR

SEQ ID NO: 27969 - protein, 35 aa, Artificial Sequence
  Quasi-synthetic sequence derived from human genome
RYLTRRRRIEIANNLCLNERQIKIWFQNRRMKWKK

SEQ ID NO: 27970 - protein, 35 aa, Artificial Sequence
  Quasi-synthetic sequence derived from human genome
KYISRPRRVELAVMLNLTERHIKIWFQNRRMKWKK

SEQ ID NO: 27971 - protein, 35 aa, Artificial Sequence
  Quasi-synthetic sequence derived from human genome
LLVGNHTQRTAILGLWKIARKWMRRKMGKWPAVVV

SEQ ID NO: 27972 - protein, 35 aa, Artificial Sequence
  Quasi-synthetic sequence derived from human genome
KSGKFIRIFQLSNNIRSVVLRHCKKRQSHLRLTLK

SEQ ID NO: 27973 - protein, 35 aa, Artificial Sequence
  Quasi-synthetic sequence derived from human genome
LRRNFMNIRPVKLKNLILLVKHWYRQVAAQNKGKG

SEQ ID NO: 27974 - protein, 35 aa, Artificial Sequence
  Quasi-synthetic sequence derived from human genome
MALRRPPRLRLCARLPDFFLLLLFRGCLIGAVNLK

SEQ ID NO: 27975 - protein, 35 aa, Artificial Sequence
  Quasi-synthetic sequence derived from human genome
KKKVLFALCSLLRHFPYAQRQFLKLGGLQVLRTLV

SEQ ID NO: 27976 - protein, 35 aa, Artificial Sequence
  Quasi-synthetic sequence derived from human genome
LRILVLIGQILFSLAAVFLLCLVIKKYLIGPYYRK

SEQ ID NO: 27977 - protein, 35 aa, Artificial Sequence
  Quasi-synthetic sequence derived from human genome
RKLLMLKKEKLEKVQNKAASLIQAMWRRYRAKKYL

SEQ ID NO: 27978 - protein, 35 aa, Artificial Sequence
  Quasi-synthetic sequence derived from human genome
LITLWVLFVFTIVGNSVVLFSTWRRKKKSRMTFFV

SEQ ID NO: 27979 - protein, 35 aa, Artificial Sequence
  Quasi-synthetic sequence derived from human genome
RVITPEDLLFLMRKDKKKLRRLLKYMFIRDYKSKI

SEQ ID NO: 27980 - protein, 35 aa, Artificial Sequence
  Quasi-synthetic sequence derived from human genome
FPKVRESQLLLNVVSQLAKRNLRLLVLGRKHMLRR

SEQ ID NO: 27981 - protein, 35 aa, Artificial Sequence
  Quasi-synthetic sequence derived from human genome
RYLTRRRRIEIAHTLCLSERQVKIWFQNRRMKWKK

SEQ ID NO: 27982 - protein, 35 aa, Artificial Sequence
  Quasi-synthetic sequence derived from human genome
LFLIAWRLLIARSQMARNVWFFIVSFCYKFLSYFR

SEQ ID NO: 27983 - protein, 35 aa, Artificial Sequence
  Quasi-synthetic sequence derived from human genome
LTSIIVNQLKKIIKRKHTLPNYKIRFKPFFPYQTL

SEQ ID NO: 27984 - protein, 35 aa, Artificial Sequence
  Quasi-synthetic sequence derived from human genome
LVPYRCFKRRFPGISRSTYYNWRRKALRRNPSFKP

SEQ ID NO: 27985 - protein, 35 aa, Artificial Sequence
  Quasi-synthetic sequence derived from human genome
RMMVPKVRLLYSLAFNARFLRHLWFLISSMSTRMI

SEQ ID NO: 27986 - protein, 35 aa, Artificial Sequence
  Quasi-synthetic sequence derived from human genome
LLKRRPYGRNKPLISRTMMKNILGHAFYQLIVIFI

SEQ ID NO: 27987 - protein, 35 aa, Artificial Sequence
  Quasi-synthetic sequence derived from human genome
LKWKRYGRPYFCMLGAIYLLYIICFTMCCIYRPLK

SEQ ID NO: 27988 - protein, 35 aa, Artificial Sequence
  Quasi-synthetic sequence derived from human genome
IGRMRTRLVRKRFLCLGWGLPALVVAVSVGFTRTK

SEQ ID NO: 27989 - protein, 35 aa, Artificial Sequence
  Quasi-synthetic sequence derived from human genome
KLRKVWKISLQGPCYMTLLMIAFGLLWGHLLRIKP

SEQ ID NO: 27990 - protein, 35 aa, Artificial Sequence
  Quasi-synthetic sequence derived from human genome
FFSALLVLLLVALSALFLGRWLVVRLATKWCQRKL

SEQ ID NO: 27991 - protein, 35 aa, Artificial Sequence
  Quasi-synthetic sequence derived from human genome
IFSKVRIFGLKKRRLRRQDPQLKGIVTRLYCRQGY

SEQ ID NO: 27992 - protein, 35 aa, Artificial Sequence
  Quasi-synthetic sequence derived from human genome
LKIVLDTFVYQIPRRIFIQLMKRFGLKATTKINWK

SEQ ID NO: 27993 - protein, 35 aa, Artificial Sequence
  Quasi-synthetic sequence derived from human genome
LGFLVPLTIICLCYLFIIIKVKSSGIRVGSSKRKK

SEQ ID NO: 27994 - protein, 35 aa, Artificial Sequence
  Quasi-synthetic sequence derived from human genome
KVHIKALQTLISFLLLCAIFFLFLIVSVWSPRRLR

SEQ ID NO: 27995 - protein, 35 aa, Artificial Sequence
  Quasi-synthetic sequence derived from human genome
RAARLIKLLRQGYTIRILLWTFVQSFKALPYVCLL

SEQ ID NO: 27996 - protein, 35 aa, Artificial Sequence
  Quasi-synthetic sequence derived from human genome
FRAARLIKLLRQGYTIRILLWTFVQSFKALPYVCL

SEQ ID NO: 27997 - protein, 35 aa, Artificial Sequence
  Quasi-synthetic sequence derived from human genome
QIKQWRKNLWIFVSKFTEFDARKLHKLYKHAIKKR

SEQ ID NO: 27998 - protein, 35 aa, Artificial Sequence
  Quasi-synthetic sequence derived from human genome
ILYRRLLLTKLFIRGWGRPEDLKRLFEFRKMIGNR

SEQ ID NO: 27999 - protein, 35 aa, Artificial Sequence
  Quasi-synthetic sequence derived from human genome
RSLKPMQTRVVGRLQKPCFFFHWLKLFAIPILLIA

SEQ ID NO: 28000 - protein, 35 aa, Artificial Sequence
  Quasi-synthetic sequence derived from human genome
LLLHKKIHNGKKTHKYNKCGRGFKKKSVFVVHKRI

SEQ ID NO: 28001 - protein, 36 aa, Artificial Sequence
  Quasi-synthetic sequence derived from human genome
FKRKKRIKRRALLFLSYILTHFIFLALLLILIVLLR

SEQ ID NO: 28002 - protein, 36 aa, Artificial Sequence
  Quasi-synthetic sequence derived from human genome
KRKKKKKFCYLCILLLIVLFILLCCLYRLCKKSKPI

SEQ ID NO: 28003 - protein, 36 aa, Artificial Sequence
  Quasi-synthetic sequence derived from human genome
WLRVRKARPQLILSRRPRRRLGSLRWCGRRRLRWRL

SEQ ID NO: 28004 - protein, 36 aa, Artificial Sequence
  Quasi-synthetic sequence derived from human genome
KRFLKHAGKWSLRWFLSPRWILQFRRWARKWSRFTR

SEQ ID NO: 28005 - protein, 36 aa, Artificial Sequence
  Quasi-synthetic sequence derived from human genome
LKRLVKLHIKRHYHKKFWKLGAVIFFFIIVLVLMQR

SEQ ID NO: 28006 - protein, 36 aa, Artificial Sequence
  Quasi-synthetic sequence derived from human genome
IPRWTHLLRLLRLIILLRIFHLFHQKRQLEKLIRRR

SEQ ID NO: 28007 - protein, 36 aa, Artificial Sequence
  Quasi-synthetic sequence derived from human genome
RRKSWRLEFLFLRRRCFLLTFYLWFLFFSRFLLMLF

SEQ ID NO: 28008 - protein, 36 aa, Artificial Sequence
  Quasi-synthetic sequence derived from human genome
IPIIVLLLQKAWRGTLARWRCRRLRAIYTIMRWFRR

SEQ ID NO: 28009 - protein, 36 aa, Artificial Sequence
  Quasi-synthetic sequence derived from human genome
PRWTHLLRLLRLIILLRIFHLFHQKRQLEKLIRRRV

SEQ ID NO: 28010 - protein, 36 aa, Artificial Sequence
  Quasi-synthetic sequence derived from human genome
KRWTHLVRLLRLIILIRIFHLLHQKRQLEKLMRRLV

SEQ ID NO: 28011 - protein, 36 aa, Artificial Sequence
  Quasi-synthetic sequence derived from human genome
IPLLRKRWFQLGRSMNPRARKKRSRIPLLRKRRFQL

SEQ ID NO: 28012 - protein, 36 aa, Artificial Sequence
  Quasi-synthetic sequence derived from human genome
IYWPRFIRHKCKQRFTKITQYLIRIRKLTLKRQRKL

SEQ ID NO: 28013 - protein, 36 aa, Artificial Sequence
  Quasi-synthetic sequence derived from human genome
RLLKRLLGPKLRRFLKPQGHPRLLLWFKRGLALAAF

SEQ ID NO: 28014 - protein, 36 aa, Artificial Sequence
  Quasi-synthetic sequence derived from human genome
FLARKQYRKVLYCVVIIQKNYRAFLLRRRFLHLKKA

SEQ ID NO: 28015 - protein, 36 aa, Artificial Sequence
  Quasi-synthetic sequence derived from human genome
GMKRALGRRKGVWLRLRKILFCVLGLYIAIPFLIKL

SEQ ID NO: 28016 - protein, 36 aa, Artificial Sequence
  Quasi-synthetic sequence derived from human genome
FFLQIYLIMIFLGLYINFRHLYKQRRRRYGQKKKKI

SEQ ID NO: 28017 - protein, 36 aa, Artificial Sequence
  Quasi-synthetic sequence derived from human genome
KMLVTISCILVGVLLLFVLLLVVRRRRREQRLKRLR

SEQ ID NO: 28018 - protein, 36 aa, Artificial Sequence
  Quasi-synthetic sequence derived from human genome
RFLKIIRPLRNIFLKKPVFAKTVSIFIWFFLFFISL

SEQ ID NO: 28019 - protein, 36 aa, Artificial Sequence
  Quasi-synthetic sequence derived from human genome
RVVKIAGISAGILVFILLLLVVILIVKKSKLAKKRK

SEQ ID NO: 28020 - protein, 36 aa, Artificial Sequence
  Quasi-synthetic sequence derived from human genome
ARLCLRLLLLLGYRRRCPPLLRGLVQRWRYGKVCLR

SEQ ID NO: 28021 - protein, 36 aa, Artificial Sequence
  Quasi-synthetic sequence derived from human genome
KSWRRRSCWRKWKQLSRLQRNMILFLLAFLLFCGLL

SEQ ID NO: 28022 - protein, 36 aa, Artificial Sequence
  Quasi-synthetic sequence derived from human genome
RAFLLRRRFLHLKKAAIVFQKQLRGQIARRVYRQLL

SEQ ID NO: 28023 - protein, 36 aa, Artificial Sequence
  Quasi-synthetic sequence derived from human genome
FLRLHCGLWVRRKAGYKKKLWKKTPARKKRLREFVF

SEQ ID NO: 28024 - protein, 36 aa, Artificial Sequence
  Quasi-synthetic sequence derived from human genome
NFLAKQRLRKRVNAALVIQKYWRRVLAQRKLLMLKK

SEQ ID NO: 28025 - protein, 36 aa, Artificial Sequence
  Quasi-synthetic sequence derived from human genome
LRLLRLIILLRIFHLFHQKRQLEKLIRRRVSENKRR

SEQ ID NO: 28026 - protein, 36 aa, Artificial Sequence
  Quasi-synthetic sequence derived from human genome
VIAFLLACVATVIFIITKFCLFCFRKLAKKGKKKKR

SEQ ID NO: 28027 - protein, 36 aa, Artificial Sequence
  Quasi-synthetic sequence derived from human genome
LIQRRFRTLMMRRRFLSLKKTAILIQRKYRAHLCTK

SEQ ID NO: 28028 - protein, 36 aa, Artificial Sequence
  Quasi-synthetic sequence derived from human genome
RLKLFFIKNQRSSLRIRLFNFSLKLLSCLLYIIRVL

SEQ ID NO: 28029 - protein, 36 aa, Artificial Sequence
  Quasi-synthetic sequence derived from human genome
SKLSRRWRRWNRFNRRRCRAAVKSVTFYWLVIVLVF

SEQ ID NO: 28030 - protein, 36 aa, Artificial Sequence
  Quasi-synthetic sequence derived from human genome
RRWRRWNRFNRRRCRAAVKSVTFYWLVIVLVFLNTL

SEQ ID NO: 28031 - protein, 36 aa, Artificial Sequence
  Quasi-synthetic sequence derived from human genome
RRLRRLAHLVLFCPFSKRLQGRLPGLRVRCIFLAWL

SEQ ID NO: 28032 - protein, 36 aa, Artificial Sequence
  Quasi-synthetic sequence derived from human genome
KPKLSKFILISSLAILLMVSLLLLSLWKLWRVKKFL

SEQ ID NO: 28033 - protein, 36 aa, Artificial Sequence
  Quasi-synthetic sequence derived from human genome
RLKLFFIKNQRSSLRIRLFNFSLKLLTCLLYIVRVL

SEQ ID NO: 28034 - protein, 36 aa, Artificial Sequence
  Quasi-synthetic sequence derived from human genome
RLLKRLLGPKLRRFLKPQGHPRLLLWFKRDPRPWSK

SEQ ID NO: 28035 - protein, 36 aa, Artificial Sequence
  Quasi-synthetic sequence derived from human genome
LQRCLRGFFIKRRFRSLRHKIILLQSRARGYLARQR

SEQ ID NO: 28036 - protein, 36 aa, Artificial Sequence
  Quasi-synthetic sequence derived from human genome
LKKKRRNFAELKIKRLRKKFAQKMLRKARRKLIYEK

SEQ ID NO: 28037 - protein, 36 aa, Artificial Sequence
  Quasi-synthetic sequence derived from human genome
LRGKMMQRRPRSAEVKYFYFFKILLRLRLAILKYLF

SEQ ID NO: 28038 - protein, 36 aa, Artificial Sequence
  Quasi-synthetic sequence derived from human genome
WRGVLVRRTLLVAALRAWMIQCWWRTLVQRRIRQRR

SEQ ID NO: 28039 - protein, 36 aa, Artificial Sequence
  Quasi-synthetic sequence derived from human genome
LLPLLLRLLLSCLLLPAARLARQYLLPLLRRLARRL

SEQ ID NO: 28040 - protein, 36 aa, Artificial Sequence
  Quasi-synthetic sequence derived from human genome
VRVLVRAHRHRGLRPRRQKALRMILAVVLVFFVCWL

SEQ ID NO: 28041 - protein, 36 aa, Artificial Sequence
  Quasi-synthetic sequence derived from human genome
LRKLKFSPIKYGYQPRRNFWPARLATRLLKLRYLIL

SEQ ID NO: 28042 - protein, 36 aa, Artificial Sequence
  Quasi-synthetic sequence derived from human genome
WRMYVVRRRYKIRRAATIVLQSYLRGFLARNRYRKI

SEQ ID NO: 28043 - protein, 36 aa, Artificial Sequence
  Quasi-synthetic sequence derived from human genome
RWTHLVRLLRLIILIRIFHLLHQKRQLEKLMRRLVS

SEQ ID NO: 28044 - protein, 36 aa, Artificial Sequence
  Quasi-synthetic sequence derived from human genome
IPLLRKRRFQLGRSMNPRARKNRSRIPLLRKRRFQL

SEQ ID NO: 28045 - protein, 36 aa, Artificial Sequence
  Quasi-synthetic sequence derived from human genome
LVLLLSIAIFQRQKRRKFWKAKNLQHIPLKKGKRVV

SEQ ID NO: 28046 - protein, 36 aa, Artificial Sequence
  Quasi-synthetic sequence derived from human genome
LLRKRRFQLYRSTNPRARKNRSRIPLLRKRRFQLYR

SEQ ID NO: 28047 - protein, 36 aa, Artificial Sequence
  Quasi-synthetic sequence derived from human genome
LKLTCSAFRLQRALRFLLGRLPWRVASGARRFRRWL

SEQ ID NO: 28048 - protein, 36 aa, Artificial Sequence
  Quasi-synthetic sequence derived from human genome
LLRKRRFQLYRSMNPRARKNRSHIPLVRKRRFQLRR

SEQ ID NO: 28049 - protein, 36 aa, Artificial Sequence
  Quasi-synthetic sequence derived from human genome
KYFFSPTLFRVIRLARIGRILRLIRGAKGIRTLLFA

SEQ ID NO: 28050 - protein, 36 aa, Artificial Sequence
  Quasi-synthetic sequence derived from human genome
LGAGLKVLFKKTHRILRRLFNLCKRCHRQPRFRLPK

SEQ ID NO: 28051 - protein, 36 aa, Artificial Sequence
  Quasi-synthetic sequence derived from human genome
RYWRRWNRFCRRKCRAAVKSNVFYWLVIFLVFLNTL

SEQ ID NO: 28052 - protein, 36 aa, Artificial Sequence
  Quasi-synthetic sequence derived from human genome
LRAPRKKIHRRVLKKNPLKNLRIMLKLNPYAKTMRR

SEQ ID NO: 28053 - protein, 36 aa, Artificial Sequence
  Quasi-synthetic sequence derived from human genome
HRKRMGLKMLMMMALLVPLVYTIKRHKWSVLKSRKL

SEQ ID NO: 28054 - protein, 36 aa, Artificial Sequence
  Quasi-synthetic sequence derived from human genome
MAGCTRKLTHLRKRIHRPRRRTTRRWKRWFKFRKRK

SEQ ID NO: 28055 - protein, 36 aa, Artificial Sequence
  Quasi-synthetic sequence derived from human genome
RNIGIWFFWIRLYKIRRGRTRPQALLFLCMILLLIV

SEQ ID NO: 28056 - protein, 36 aa, Artificial Sequence
  Quasi-synthetic sequence derived from human genome
LVTLLIWVPVKVILHKKRYIYRKIKGWRPVLMMCVV

SEQ ID NO: 28057 - protein, 36 aa, Artificial Sequence
  Quasi-synthetic sequence derived from human genome
LVRKRRFQLRRCMNPRARKNRSQIVLFQKRRFHFFC

SEQ ID NO: 28058 - protein, 36 aa, Artificial Sequence
  Quasi-synthetic sequence derived from human genome
RARRRRRRRRRRDLLLSQLCFLASVALLLWSLSSLR

SEQ ID NO: 28059 - protein, 36 aa, Artificial Sequence
  Quasi-synthetic sequence derived from human genome
CNRRLKSQILLKKYLMKRRWKKNFIAVSAANRFKKI

SEQ ID NO: 28060 - protein, 36 aa, Artificial Sequence
  Quasi-synthetic sequence derived from human genome
LLRKRWFQLGHSMNPRARKNRSRIPLLRKRRFQLYR

SEQ ID NO: 28061 - protein, 36 aa, Artificial Sequence
  Quasi-synthetic sequence derived from human genome
WSGFLLCAIAMFLVIFPMFTFPKKLPPRHKKKKKKK

SEQ ID NO: 28062 - protein, 36 aa, Artificial Sequence
  Quasi-synthetic sequence derived from human genome
LFVYLNRKIVQVMRKQKTINRFLMRKRLLFPALVTL

SEQ ID NO: 28063 - protein, 36 aa, Artificial Sequence
  Quasi-synthetic sequence derived from human genome
YKTMKFILWRRFRWAIILFIILFILLLFLAIFIYAF

SEQ ID NO: 28064 - protein, 36 aa, Artificial Sequence
  Quasi-synthetic sequence derived from human genome
RRYGKLSRHLMKVKLKKYTKFLFVRDPFVRLISAFR

SEQ ID NO: 28065 - protein, 36 aa, Artificial Sequence
  Quasi-synthetic sequence derived from human genome
LYLIYNLLQAVFFVLFVLSVHYLWKKWKKHQKKLKK

SEQ ID NO: 28066 - protein, 36 aa, Artificial Sequence
  Quasi-synthetic sequence derived from human genome
FYFPKREKKRILFLYNDLLKKRAAFTKLRRAAILRR

SEQ ID NO: 28067 - protein, 36 aa, Artificial Sequence
  Quasi-synthetic sequence derived from human genome
RVCRRLRRANRVLRARCRRAVKSNACYWAVLLLVFL

SEQ ID NO: 28068 - protein, 36 aa, Artificial Sequence
  Quasi-synthetic sequence derived from human genome
FQRALALFVLTCVVLTFLGHRLLKRLLGPKLRRFLK

SEQ ID NO: 28069 - protein, 36 aa, Artificial Sequence
  Quasi-synthetic sequence derived from human genome
FRIYAVSTLLLFLLFFLFRLLLRFLRLCRSFYITCR

SEQ ID NO: 28070 - protein, 36 aa, Artificial Sequence
  Quasi-synthetic sequence derived from human genome
LRRQMWWRGCKIKAIMALVAAILLLVIIILIVMKYR

SEQ ID NO: 28071 - protein, 36 aa, Artificial Sequence
  Quasi-synthetic sequence derived from human genome
RVSVRTWWRWLTFWRRLQSAFLKNRSLRTKSSLWRR

SEQ ID NO: 28072 - protein, 36 aa, Artificial Sequence
  Quasi-synthetic sequence derived from human genome
LRAACIRIQKTIRGWLLRKKYLRMRKAAITMQRYVR

SEQ ID NO: 28073 - protein, 36 aa, Artificial Sequence
  Quasi-synthetic sequence derived from human genome
QAIFRGKKARRHLKMMHIAATLIQRRFRTLMMRRRF

SEQ ID NO: 28074 - protein, 36 aa, Artificial Sequence
  Quasi-synthetic sequence derived from human genome
RLKNIRKVYGRCMWYRLRLLKPQPNIIPTVKKIVLL

SEQ ID NO: 28075 - protein, 36 aa, Artificial Sequence
  Quasi-synthetic sequence derived from human genome
LVLLVSLGVAIHLCCRRRRARLRFMKQKFNIVCLKI

SEQ ID NO: 28076 - protein, 36 aa, Artificial Sequence
  Quasi-synthetic sequence derived from human genome
WKFFMARVRLQLKIILCFSPVGRTLRVRARKFPAIV

SEQ ID NO: 28077 - protein, 36 aa, Artificial Sequence
  Quasi-synthetic sequence derived from human genome
KKKKKRYLRASSNRNFLLTMRPFLKRAILVLSYVLV

SEQ ID NO: 28078 - protein, 36 aa, Artificial Sequence
  Quasi-synthetic sequence derived from human genome
RRVTRNLVRNKLAVITRLLQNLIMGLFLLFFVLRVR

SEQ ID NO: 28079 - protein, 36 aa, Artificial Sequence
  Quasi-synthetic sequence derived from human genome
LIILAVVGGVIGLLILILLIKKLIIFILKKTREKKK

SEQ ID NO: 28080 - protein, 36 aa, Artificial Sequence
  Quasi-synthetic sequence derived from human genome
KPMRWPFFLFIPFFIIFCVLIAIMVKVNFQRKKWRT

SEQ ID NO: 28081 - protein, 36 aa, Artificial Sequence
  Quasi-synthetic sequence derived from human genome
LRRKKKKTIKMLMLVVVLFALCWFPLNCYVLLLSSK

SEQ ID NO: 28082 - protein, 36 aa, Artificial Sequence
  Quasi-synthetic sequence derived from human genome
LKRFKVMKPKVLRSWCRQILKGLLFLHTRTPPIIHR

SEQ ID NO: 28083 - protein, 36 aa, Artificial Sequence
  Quasi-synthetic sequence derived from human genome
HWRGALARKAIQRRKWAVRIIRKFIKGFISRNKPLC

SEQ ID NO: 28084 - protein, 36 aa, Artificial Sequence
  Quasi-synthetic sequence derived from human genome
IRGGATRAAGVFYPWRFRLLCLLRRWLPRPRAWFIR

SEQ ID NO: 28085 - protein, 36 aa, Artificial Sequence
  Quasi-synthetic sequence derived from human genome
KIFKCYFKHTLQQKVFILFLTLWLLSLLKLLNVRRL

SEQ ID NO: 28086 - protein, 36 aa, Artificial Sequence
  Quasi-synthetic sequence derived from human genome
VLKIRRRKMNHHKYRKLVKKTRFLRRKVQEGRLRRK

SEQ ID NO: 28087 - protein, 36 aa, Artificial Sequence
  Quasi-synthetic sequence derived from human genome
RAARPPLLLRPVKLLRRRFRLLLALAVVSVGLWTLY

SEQ ID NO: 28088 - protein, 36 aa, Artificial Sequence
  Quasi-synthetic sequence derived from human genome
LLRKRRFQLGRSMNLRARKNRSQIVLFQKRRFQFFC

SEQ ID NO: 28089 - protein, 36 aa, Artificial Sequence
  Quasi-synthetic sequence derived from human genome
VRLLRLIILIRIFHLLHQKRQLEKLMRRLVSENKRR

SEQ ID NO: 28090 - protein, 36 aa, Artificial Sequence
  Quasi-synthetic sequence derived from human genome
FKAKNIKKKKVSIMVSVDGVKVILKKKKKLLLLQKK

SEQ ID NO: 28091 - protein, 36 aa, Artificial Sequence
  Quasi-synthetic sequence derived from human genome
FCLLAKGLLIFLLLVILAMGLWVIRVQKRHKMPRMK

SEQ ID NO: 28092 - protein, 36 aa, Artificial Sequence
  Quasi-synthetic sequence derived from human genome
RAQMLIRIVLFLQKVWRGTLARMRYKRTKAALTIIR

SEQ ID NO: 28093 - protein, 36 aa, Artificial Sequence
  Quasi-synthetic sequence derived from human genome
LVALLAVIVLVALLLLWRRRQKRRTGALVLSRGGKR

SEQ ID NO: 28094 - protein, 36 aa, Artificial Sequence
  Quasi-synthetic sequence derived from human genome
RRRFISLKKATIFVQRKYRATICAKHKLYQFLHLRK

SEQ ID NO: 28095 - protein, 36 aa, Artificial Sequence
  Quasi-synthetic sequence derived from human genome
ALLRLLGLRRGLRRLRRLWAGPRVQRGRGRGRGRGW

SEQ ID NO: 28096 - protein, 36 aa, Artificial Sequence
  Quasi-synthetic sequence derived from human genome
LKKRSKQPLGEVKRRLSLYLTKIHFWLPVLKMIRKK

SEQ ID NO: 28097 - protein, 36 aa, Artificial Sequence
  Quasi-synthetic sequence derived from human genome
LLRKRRFQLYRSTNPRARKNRSRIPLLRKHRFQLYR

SEQ ID NO: 28098 - protein, 36 aa, Artificial Sequence
  Quasi-synthetic sequence derived from human genome
LKRFKVMKIKVLRSWCRQILKGLQFLHTRTPPIIHR

SEQ ID NO: 28099 - protein, 36 aa, Artificial Sequence
  Quasi-synthetic sequence derived from human genome
RCYRLAVRTVIRAFVKCTKARYLKKKNMRTLWINRI

SEQ ID NO: 28100 - protein, 36 aa, Artificial Sequence
  Quasi-synthetic sequence derived from human genome
LSIMSKFKLLSSLPRWRRIAQKIIRERRKKRVPKKP

SEQ ID NO: 28101 - protein, 36 aa, Artificial Sequence
  Quasi-synthetic sequence derived from human genome
GKMCICFSFCLWFVLQVLIVVLRIVRYRKSSKLIKK

SEQ ID NO: 28102 - protein, 36 aa, Artificial Sequence
  Quasi-synthetic sequence derived from human genome
FCLKLLLPGLLLLLVVIILILAFWVLPKYKTRKAMR

SEQ ID NO: 28103 - protein, 36 aa, Artificial Sequence
  Quasi-synthetic sequence derived from human genome
RRRPALGWLARLLRSRAGSRKRPLTLLQRAGLLLLL

SEQ ID NO: 28104 - protein, 36 aa, Artificial Sequence
  Quasi-synthetic sequence derived from human genome
RLGLLGRRGFSGRLGGYWKTWIFWKTWIFWKTWIFR

SEQ ID NO: 28105 - protein, 36 aa, Artificial Sequence
  Quasi-synthetic sequence derived from human genome
TGMVGALLLLLVVALGIGLFMRRRHIVRKRTLRRLL

SEQ ID NO: 28106 - protein, 36 aa, Artificial Sequence
  Quasi-synthetic sequence derived from human genome
LLRKRRFQLCRCMNPRARKNRSQIVLFQKLRFQFFC

SEQ ID NO: 28107 - protein, 36 aa, Artificial Sequence
  Quasi-synthetic sequence derived from human genome
KLLVHSLNLLAKQGLRLLRGLRRRNVQKKVALAKKL

SEQ ID NO: 28108 - protein, 36 aa, Artificial Sequence
  Quasi-synthetic sequence derived from human genome
MLLFFTILVLSYFRYMRIYRRYIYEPLHKPQRKRKK

SEQ ID NO: 28109 - protein, 36 aa, Artificial Sequence
  Quasi-synthetic sequence derived from human genome
VLGFLRVVRFVRILRIFKLTRHFVGLRVLGHTLRAS

SEQ ID NO: 28110 - protein, 36 aa, Artificial Sequence
  Quasi-synthetic sequence derived from human genome
LLRKRRFQLYRSMNSRARKNRSQIVLFQKRRFHFFC

SEQ ID NO: 28111 - protein, 36 aa, Artificial Sequence
  Quasi-synthetic sequence derived from human genome
AGVIGGLFILVIVGLTFAVYVRRKSIKKKRALRRFL

SEQ ID NO: 28112 - protein, 36 aa, Artificial Sequence
  Quasi-synthetic sequence derived from human genome
QKYFVSPTLFRVIRLARIGRVLRLIRGAKGIRTLLF

SEQ ID NO: 28113 - protein, 36 aa, Artificial Sequence
  Quasi-synthetic sequence derived from human genome
IKQIRARRKTARMLMIVLLVFAICYLPISILNVLKR

SEQ ID NO: 28114 - protein, 36 aa, Artificial Sequence
  Quasi-synthetic sequence derived from human genome
LFLCGLLSKAKQKLLRHLVPAAALRRKRKALWAHLF

SEQ ID NO: 28115 - protein, 36 aa, Artificial Sequence
  Quasi-synthetic sequence derived from human genome
IIRTPILMTILINFLIFIRILGILLSKLRTRQMRCR

SEQ ID NO: 28116 - protein, 36 aa, Artificial Sequence
  Quasi-synthetic sequence derived from human genome
LVLIVLVTLIFCLIVLSLSTFHIHKRRMKKRKMQRA

SEQ ID NO: 28117 - protein, 36 aa, Artificial Sequence
  Quasi-synthetic sequence derived from human genome
KKKQKSTKKFWIQKLPKVLCLHLKRFHWTAYLRNKV

SEQ ID NO: 28118 - protein, 36 aa, Artificial Sequence
  Quasi-synthetic sequence derived from human genome
LLVAGVLVLLVSLGVAIHLCCRRRRARLRFMKQLRL

SEQ ID NO: 28119 - protein, 36 aa, Artificial Sequence
  Quasi-synthetic sequence derived from human genome
IPVFRLARRRKKILFYCHFPDLLLTKRDSFLKRLYR

SEQ ID NO: 28120 - protein, 36 aa, Artificial Sequence
  Quasi-synthetic sequence derived from human genome
RRRNTPFHERFFRFLLRKLYVFRRSFLMTCISLRNL

SEQ ID NO: 28121 - protein, 36 aa, Artificial Sequence
  Quasi-synthetic sequence derived from human genome
RRLLLALHRRLRGLRRAAAGTSRLLFQRLLPCGVIK

SEQ ID NO: 28122 - protein, 36 aa, Artificial Sequence
  Quasi-synthetic sequence derived from human genome
LLRKPWFQLGHSMNPRARKNRSRIPLLRKRRFQLYR

SEQ ID NO: 28123 - protein, 36 aa, Artificial Sequence
  Quasi-synthetic sequence derived from human genome
IGRRLQARRFRRSRRTGRLVVLIILTFAAFWLPYHV

SEQ ID NO: 28124 - protein, 36 aa, Artificial Sequence
  Quasi-synthetic sequence derived from human genome
MRRKLKFFFMNPCEKFWARGRKPWKLAIQILKIAMV

SEQ ID NO: 28125 - protein, 36 aa, Artificial Sequence
  Quasi-synthetic sequence derived from human genome
FRVFRALKAISVVSRLKVIVGALLRSVKKLVNVIIL

SEQ ID NO: 28126 - protein, 36 aa, Artificial Sequence
  Quasi-synthetic sequence derived from human genome
KVTWMRRMRILRRLLRRYRESKKIDRHMYHSLYLKV

SEQ ID NO: 28127 - protein, 36 aa, Artificial Sequence
  Quasi-synthetic sequence derived from human genome
RPSRRFLGKKYRKYYYKSPKPLLRPFLCRICGSRFL

SEQ ID NO: 28128 - protein, 36 aa, Artificial Sequence
  Quasi-synthetic sequence derived from human genome
ILKSLQSYFSPTLFRVIRLARIGRILRLIRAAKGIR

SEQ ID NO: 28129 - protein, 36 aa, Artificial Sequence
  Quasi-synthetic sequence derived from human genome
VLVILLVIYVSWKRYPASMKQLQQRSLMRRHRKKKR

SEQ ID NO: 28130 - protein, 36 aa, Artificial Sequence
  Quasi-synthetic sequence derived from human genome
KARKFFLFYRQQKWASGVIAIAWLLYCHKTRLKKIL

SEQ ID NO: 28131 - protein, 36 aa, Artificial Sequence
  Quasi-synthetic sequence derived from human genome
YSSIVSFYVPFIVTLLVYIKIYIVLRRRRKRVNTKR

SEQ ID NO: 28132 - protein, 36 aa, Artificial Sequence
  Quasi-synthetic sequence derived from human genome
ILILGNKKLKQIFLSVLRHVRYWVKDRSLRLHRFTR

SEQ ID NO: 28133 - protein, 36 aa, Artificial Sequence
  Quasi-synthetic sequence derived from human genome
FKLLILLIGTWALFFRKRRADMPRVFVFRALLLVLI

SEQ ID NO: 28134 - protein, 36 aa, Artificial Sequence
  Quasi-synthetic sequence derived from human genome
LRRRLKYFFMSPCDKFRAKGRKPCKLMLQVVKILVV

SEQ ID NO: 28135 - protein, 36 aa, Artificial Sequence
  Quasi-synthetic sequence derived from human genome
LWRRQIYAVATLRFLKLRRERRALLCLLLVLGIAFI

SEQ ID NO: 28136 - protein, 36 aa, Artificial Sequence
  Quasi-synthetic sequence derived from human genome
RAFLRLLRCQCRRRRRRRPLWRVYGHHWRASTSGLR

SEQ ID NO: 28137 - protein, 36 aa, Artificial Sequence
  Quasi-synthetic sequence derived from human genome
LLLWVKQRKDLLHLCCKKLKILGMPFRNIRSILKMV

SEQ ID NO: 28138 - protein, 36 aa, Artificial Sequence
  Quasi-synthetic sequence derived from human genome
KIKTFLSLVWKRRILFFVVTLVSVFLVWKFTYAHKY

SEQ ID NO: 28139 - protein, 36 aa, Artificial Sequence
  Quasi-synthetic sequence derived from human genome
RPPGARTRAGAARVARWRRLRLQQLRRLRGLLRVLR

SEQ ID NO: 28140 - protein, 36 aa, Artificial Sequence
  Quasi-synthetic sequence derived from human genome
LLTLALLTVNALLVLLALAAWASRWLRRKLRARRKG

SEQ ID NO: 28141 - protein, 36 aa, Artificial Sequence
  Quasi-synthetic sequence derived from human genome
FKLLILLLGSWALFFRRPKASLPRVFVLRALLMVLV

SEQ ID NO: 28142 - protein, 36 aa, Artificial Sequence
  Quasi-synthetic sequence derived from human genome
AWLKVFYCLRIANFNHPLFFLMKRKIIVLMPWLLRL

SEQ ID NO: 28143 - protein, 36 aa, Artificial Sequence
  Quasi-synthetic sequence derived from human genome
RMQVFAMARLRFLKLKRQTKVLLTLLLVFGIAIFPL

SEQ ID NO: 28144 - protein, 36 aa, Artificial Sequence
  Quasi-synthetic sequence derived from human genome
IWVKMYGYFAGLCRRLQKFWRVTVKGFFVKKKEKKI

SEQ ID NO: 28145 - protein, 36 aa, Artificial Sequence
  Quasi-synthetic sequence derived from human genome
VKILRVLRVLRPLRAINRAKGLKHVVQCVFVAIRTI

SEQ ID NO: 28146 - protein, 36 aa, Artificial Sequence
  Quasi-synthetic sequence derived from human genome
AILRIIRLVRVFRIFKLSRHSKGLQILGHTLRASMR

SEQ ID NO: 28147 - protein, 36 aa, Artificial Sequence
  Quasi-synthetic sequence derived from human genome
YLKVFYKFINLNRYKIRHTRKKPFKCKNCVKSFCMF

SEQ ID NO: 28148 - protein, 36 aa, Artificial Sequence
  Quasi-synthetic sequence derived from human genome
KAPRPAARRKARRLLKTVLMILLAFLVCWGPLFGLL

SEQ ID NO: 28149 - protein, 36 aa, Artificial Sequence
  Quasi-synthetic sequence derived from human genome
MVVVMKFFRWVRRAWQRIISWVFFWRQKIKPTISGH

SEQ ID NO: 28150 - protein, 36 aa, Artificial Sequence
  Quasi-synthetic sequence derived from human genome
PLRLRHLRRPRVARLLCLGVWALILVFAVPAARVHR

SEQ ID NO: 28151 - protein, 36 aa, Artificial Sequence
  Quasi-synthetic sequence derived from human genome
RWLLRTKRLHWSRLLFLLGMLIIGSTYQHLRRPRGL

SEQ ID NO: 28152 - protein, 36 aa, Artificial Sequence
  Quasi-synthetic sequence derived from human genome
LSVLILGLLIMFITIVFCAAGIVVLVLHRRRRYKKK

SEQ ID NO: 28153 - protein, 36 aa, Artificial Sequence
  Quasi-synthetic sequence derived from human genome
RFRRAFVTVTHRLLLLCLGVVMVCVVLRYMKYRWTK

SEQ ID NO: 28154 - protein, 36 aa, Artificial Sequence
  Quasi-synthetic sequence derived from human genome
RRLRKNLRALVVVHATWYVKAFLALLRPFISSKFTR

SEQ ID NO: 28155 - protein, 36 aa, Artificial Sequence
  Quasi-synthetic sequence derived from human genome
CRLKIRKCMGRLHLRCPVFMSFLPLPNRLKAYVLYK

SEQ ID NO: 28156 - protein, 36 aa, Artificial Sequence
  Quasi-synthetic sequence derived from human genome
WRILKVLLWLLAILTGLIAGKFLFHQRLFGQLLRLK

SEQ ID NO: 28157 - protein, 36 aa, Artificial Sequence
  Quasi-synthetic sequence derived from human genome
VLVKRKRTKGKKLLLSIGVLLHKWKNVCIVLTALNF

SEQ ID NO: 28158 - protein, 36 aa, Artificial Sequence
  Quasi-synthetic sequence derived from human genome
KAKQRLKRLRNIHYLFNTALFLIAWRLLIARSQMAR

SEQ ID NO: 28159 - protein, 36 aa, Artificial Sequence
  Quasi-synthetic sequence derived from human genome
FLALQSLRFGFGFRRGRSFLLRSWHHLMKRVQIKIF

SEQ ID NO: 28160 - protein, 36 aa, Artificial Sequence
  Quasi-synthetic sequence derived from human genome
WALIAIAIVAVLLVLTCCFCICKKCLFKKKNKKKGK

SEQ ID NO: 28161 - protein, 36 aa, Artificial Sequence
  Quasi-synthetic sequence derived from human genome
RVRVLSVARPGLWLYTHPLIKLLFLPRRSRCKFFSL

SEQ ID NO: 28162 - protein, 36 aa, Artificial Sequence
  Quasi-synthetic sequence derived from human genome
KVALFAAVGAGCVIFLLIIIFLTVLLLKLRKRHRKH

SEQ ID NO: 28163 - protein, 36 aa, Artificial Sequence
  Quasi-synthetic sequence derived from human genome
LAHLCRLRVRKAIGKYRIKLLDTLPLPGRLIRYLKY

SEQ ID NO: 28164 - protein, 36 aa, Artificial Sequence
  Quasi-synthetic sequence derived from human genome
RAAYYQKKSRKKMCILVLVLSVIILILGLIIWLVYK

SEQ ID NO: 28165 - protein, 36 aa, Artificial Sequence
  Quasi-synthetic sequence derived from human genome
LRPLVKPKIVKKRTKKFIRHQSDRYVKIKRNWRKPR

SEQ ID NO: 28166 - protein, 36 aa, Artificial Sequence
  Quasi-synthetic sequence derived from human genome
KRMRVKKLPMILALHLKRFKYMEQLHRYTKLSYRVV

SEQ ID NO: 28167 - protein, 36 aa, Artificial Sequence
  Quasi-synthetic sequence derived from human genome
KGQKKKKIVKYGMGGLIILFLIAIIWFPLLFMSLVR

SEQ ID NO: 28168 - protein, 36 aa, Artificial Sequence
  Quasi-synthetic sequence derived from human genome
RRRGFGLFFFLRLHRLLLLFLVLRGTLANKLNVPQV

SEQ ID NO: 28169 - protein, 36 aa, Artificial Sequence
  Quasi-synthetic sequence derived from human genome
VIGFLLACVATVIFIITKFCLFCFWKFARKGKKGKR

SEQ ID NO: 28170 - protein, 36 aa, Artificial Sequence
  Quasi-synthetic sequence derived from human genome
KGIQCFLVVVALLCVPWMLLFKPLVLRRQYLRRKHL

SEQ ID NO: 28171 - protein, 36 aa, Artificial Sequence
  Quasi-synthetic sequence derived from human genome
LSFLRLFRAARLIKLLRQGYTIRILLWTFVQSFKAL

SEQ ID NO: 28172 - protein, 36 aa, Artificial Sequence
  Quasi-synthetic sequence derived from human genome
GRRRRRLRRRPRGLRCSRLPPPPPLPLLLGLLLAAA

SEQ ID NO: 28173 - protein, 36 aa, Artificial Sequence
  Quasi-synthetic sequence derived from human genome
LIPKKFQLNQHRRIKLSPLMMYEKLSMIRFRYRILR

SEQ ID NO: 28174 - protein, 36 aa, Artificial Sequence
  Quasi-synthetic sequence derived from human genome
RAMLYSRAVRNLKKKLLPWQRRGLLRAQGLRGWKAR

SEQ ID NO: 28175 - protein, 36 aa, Artificial Sequence
  Quasi-synthetic sequence derived from human genome
MVGVGLCLRLLLFFRFKRTLDRICVLFLLGWHRKPR

SEQ ID NO: 28176 - protein, 36 aa, Artificial Sequence
  Quasi-synthetic sequence derived from human genome
RRSQRASFKRARRPGARALRLVLGIVLLFWACFLPF

SEQ ID NO: 28177 - protein, 36 aa, Artificial Sequence
  Quasi-synthetic sequence derived from human genome
LGLTMVGKIKRLKKSAFVVLILLITAKLLVLPLLCR

SEQ ID NO: 28178 - protein, 36 aa, Artificial Sequence
  Quasi-synthetic sequence derived from human genome
FHWRQKFLRVKRSAICIQSWWRGTLGRRKAAKRKWA

SEQ ID NO: 28179 - protein, 36 aa, Artificial Sequence
  Quasi-synthetic sequence derived from human genome
LKRFKVMKPKVLRSWCRQILKGLQFLHTRTPPIIHR

SEQ ID NO: 28180 - protein, 36 aa, Artificial Sequence
  Quasi-synthetic sequence derived from human genome
KIIQKHFEKKKDIRRGIGYLKLICFLIPFLLSLKKK

SEQ ID NO: 28181 - protein, 36 aa, Artificial Sequence
  Quasi-synthetic sequence derived from human genome
FIKMMIIFSIAFITVLIFKVYMFKCVWRCYRLIKCM

SEQ ID NO: 28182 - protein, 36 aa, Artificial Sequence
  Quasi-synthetic sequence derived from human genome
IINKDILRRVLVLMASKHAFLALCALRFKRKIIGLK

SEQ ID NO: 28183 - protein, 36 aa, Artificial Sequence
  Quasi-synthetic sequence derived from human genome
RNKVRHTKKKTFKCIKCSKSFFMLSCLIRHKRIHIR

SEQ ID NO: 28184 - protein, 36 aa, Artificial Sequence
  Quasi-synthetic sequence derived from human genome
LYGFIFYLLASVLLSLLLILKAGRRWNKYFKSRRPL

SEQ ID NO: 28185 - protein, 36 aa, Artificial Sequence
  Quasi-synthetic sequence derived from human genome
LRRRPARTLGLLLLVVLGFLVLRRLDWSTLVPLRLR

SEQ ID NO: 28186 - protein, 36 aa, Artificial Sequence
  Quasi-synthetic sequence derived from human genome
CKTMKFIVWRRFKWVIIGLLFLLILLLFVAVLLYSL

SEQ ID NO: 28187 - protein, 36 aa, Artificial Sequence
  Quasi-synthetic sequence derived from human genome
QKLLKRLRLLPALLILRAFKPHRKIRDYRVVVVGTA

SEQ ID NO: 28188 - protein, 36 aa, Artificial Sequence
  Quasi-synthetic sequence derived from human genome
GGILIYKNRVRMNTFPWLKIVKISFKCKQFFIQLRK

SEQ ID NO: 28189 - protein, 36 aa, Artificial Sequence
  Quasi-synthetic sequence derived from human genome
KRMKVKKLPMILALHLKRFKYMDQLHRYTKLSYRVV

SEQ ID NO: 28190 - protein, 36 aa, Artificial Sequence
  Quasi-synthetic sequence derived from human genome
RVAARVQRRPWGAWLSARLWKWLKSPRSWRLGLALL

SEQ ID NO: 28191 - protein, 36 aa, Artificial Sequence
  Quasi-synthetic sequence derived from human genome
QRRRRAMRAFRMLLYSKSTSLTFHWKLWGRHRGRRR

SEQ ID NO: 28192 - protein, 36 aa, Artificial Sequence
  Quasi-synthetic sequence derived from human genome
RLLRGLWQRWRRYKYRFVPWIALNLSHNPRTLRYVP

SEQ ID NO: 28193 - protein, 36 aa, Artificial Sequence
  Quasi-synthetic sequence derived from human genome
KLDLWRLPPILIIHLKRFQFVNGRWIKSQKIVKFPR

SEQ ID NO: 28194 - protein, 36 aa, Artificial Sequence
  Quasi-synthetic sequence derived from human genome
HNKKHLILAFCAGVLLTLLLIAFIFLIIKSYRKYRR

SEQ ID NO: 28195 - protein, 36 aa, Artificial Sequence
  Quasi-synthetic sequence derived from human genome
RWLRIKLWISTVALALVPFLLLIPKFARWFSVPWKV

SEQ ID NO: 28196 - protein, 36 aa, Artificial Sequence
  Quasi-synthetic sequence derived from human genome
RGRKRCIKKFSIQRFPKILVLHLKRFSESRIRTSKL

SEQ ID NO: 28197 - protein, 36 aa, Artificial Sequence
  Quasi-synthetic sequence derived from human genome
AILRIIRLVRVFRIFKLSRHSKGLQILGQTLKASMR

SEQ ID NO: 28198 - protein, 36 aa, Artificial Sequence
  Quasi-synthetic sequence derived from human genome
QLLLWKNWTLRKRQKIRFVVELVWPLSLFLVLIWLR

SEQ ID NO: 28199 - protein, 36 aa, Artificial Sequence
  Quasi-synthetic sequence derived from human genome
RLSRALLTAVTNVLIFFWCLAFLWGLLILLKYRWRK

SEQ ID NO: 28200 - protein, 36 aa, Artificial Sequence
  Quasi-synthetic sequence derived from human genome
RKAPLWLRAKFQRLLFKLGCYIQKNCGKFLVVGLLI

SEQ ID NO: 28201 - protein, 36 aa, Artificial Sequence
  Quasi-synthetic sequence derived from human genome
KLKLFRHYYVLIVCYIYFTRIIAFLLKLAVPFQWKW

SEQ ID NO: 28202 - protein, 36 aa, Artificial Sequence
  Quasi-synthetic sequence derived from human genome
ICYTGIIKTLLRCPSKKKYKAIRLIFVIMAVFFIFW

SEQ ID NO: 28203 - protein, 36 aa, Artificial Sequence
  Quasi-synthetic sequence derived from human genome
RNLRLPKRLRVVYFLARTRLAQRLIMAGTVVWIGIL

SEQ ID NO: 28204 - protein, 36 aa, Artificial Sequence
  Quasi-synthetic sequence derived from human genome
CVLQKRSWPFLRSFRVLRVFKLAKSWPTLNTLIKII

SEQ ID NO: 28205 - protein, 36 aa, Artificial Sequence
  Quasi-synthetic sequence derived from human genome
LVVFKSAPILKRALKVKQAMLQLYVLKLLKLQTKYL

SEQ ID NO: 28206 - protein, 36 aa, Artificial Sequence
  Quasi-synthetic sequence derived from human genome
MRLKKHRWYKKILKSRDPIIFSVGWRRFQTIPLYYI

SEQ ID NO: 28207 - protein, 36 aa, Artificial Sequence
  Quasi-synthetic sequence derived from human genome
IFKKKAHKLTSAPLKQNFQKLLKLFYIKKLKPLYNY

SEQ ID NO: 28208 - protein, 36 aa, Artificial Sequence
  Quasi-synthetic sequence derived from human genome
VKFYIHAIGIGKCKRRIVKCGKLHKKGRKLCVYAFK

SEQ ID NO: 28209 - protein, 36 aa, Artificial Sequence
  Quasi-synthetic sequence derived from human genome
VIAFLLACVATMIFMITKCCLFCFRKLAKTGKKKKR

SEQ ID NO: 28210 - protein, 36 aa, Artificial Sequence
  Quasi-synthetic sequence derived from human genome
MKKFLYIKSVFHTLRMAQRRHKRVRTWTRHINIFNK

SEQ ID NO: 28211 - protein, 36 aa, Artificial Sequence
  Quasi-synthetic sequence derived from human genome
RWRTRYKTIRINLGLWAASFILALPVWVYSKVIKFK

SEQ ID NO: 28212 - protein, 36 aa, Artificial Sequence
  Quasi-synthetic sequence derived from human genome
RRNKAALLFWHILLLGPIVRCLHTIRNYHKWLKNLK

SEQ ID NO: 28213 - protein, 36 aa, Artificial Sequence
  Quasi-synthetic sequence derived from human genome
RPKTSFNWFVNPLKTFVFFIWRRYWRTLVLLLLVLL

SEQ ID NO: 28214 - protein, 36 aa, Artificial Sequence
  Quasi-synthetic sequence derived from human genome
RPKGYRKLLALGTWLLALLLTLPVMLAMRLVRRGPK

SEQ ID NO: 28215 - protein, 36 aa, Artificial Sequence
  Quasi-synthetic sequence derived from human genome
FLKLFRAARLIKLLRQGYTIRILLWTFVQSFKALPY

SEQ ID NO: 28216 - protein, 36 aa, Artificial Sequence
  Quasi-synthetic sequence derived from human genome
LLLRFLRLCRSFYITCRRLRCFPQPPRRNWLLGHLG

SEQ ID NO: 28217 - protein, 36 aa, Artificial Sequence
  Quasi-synthetic sequence derived from human genome
RIIWHKFKQWVIPWHLNKRYNRKRFFALPYVDHFLR

SEQ ID NO: 28218 - protein, 36 aa, Artificial Sequence
  Quasi-synthetic sequence derived from human genome
LLRKHRFQLYRSMNSRARKNRSQIVLFQKRRFHFFC

SEQ ID NO: 28219 - protein, 36 aa, Artificial Sequence
  Quasi-synthetic sequence derived from human genome
FVLVHSFLKKLLGKKLTRCLKPFENSRLRLWTKWVF

SEQ ID NO: 28220 - protein, 36 aa, Artificial Sequence
  Quasi-synthetic sequence derived from human genome
PRLPVKKIRKQMKLLLLLLLLSCAAWLTYVHLGLVR

SEQ ID NO: 28221 - protein, 36 aa, Artificial Sequence
  Quasi-synthetic sequence derived from human genome
LLFLCLLPLIVKHIRKKQAKKAAAIRAKKSSKVRAS

SEQ ID NO: 28222 - protein, 36 aa, Artificial Sequence
  Quasi-synthetic sequence derived from human genome
RSIAIIVPLVLLVTLITTLVIGLVLCKRKRRTKTIR

SEQ ID NO: 28223 - protein, 36 aa, Artificial Sequence
  Quasi-synthetic sequence derived from human genome
WRRRKSLWLALSASWLLLVLLGGFSLLRLALPPRPR

SEQ ID NO: 28224 - protein, 36 aa, Artificial Sequence
  Quasi-synthetic sequence derived from human genome
LVLRGNTKINTFNWAKIRKLSFKRKHFLIKLHANIL

SEQ ID NO: 28225 - protein, 36 aa, Artificial Sequence
  Quasi-synthetic sequence derived from human genome
AIRLSLIMQLVALLLVVLWIRWKCRRLRIREAWLLG

SEQ ID NO: 28226 - protein, 36 aa, Artificial Sequence
  Quasi-synthetic sequence derived from human genome
YWRRYSTRQRFLKLKYYSIILQSRIRMIIAVTSYKR

SEQ ID NO: 28227 - protein, 36 aa, Artificial Sequence
  Quasi-synthetic sequence derived from human genome
KTIKSLRVLRVLRPLKTIKRLPKLKAVFDCVVTSLK

SEQ ID NO: 28228 - protein, 36 aa, Artificial Sequence
  Quasi-synthetic sequence derived from human genome
RWARPFYLAFVFCLALGLLQAIKLYLRRQRLLRDLR

SEQ ID NO: 28229 - protein, 36 aa, Artificial Sequence
  Quasi-synthetic sequence derived from human genome
KLKNILLRIQQIIYCHKLTIILTKWRNTARHKSKKK

SEQ ID NO: 28230 - protein, 36 aa, Artificial Sequence
  Quasi-synthetic sequence derived from human genome
FMPLGIILFCSFKIVWSLRRRQQLARQARMKKATRF

SEQ ID NO: 28231 - protein, 36 aa, Artificial Sequence
  Quasi-synthetic sequence derived from human genome
ALAAQLALLGLGLLHALLLVLLLCRLRRLRARARAR

SEQ ID NO: 28232 - protein, 36 aa, Artificial Sequence
  Quasi-synthetic sequence derived from human genome
FPRFIKIIEVKNKKLVELLRRKVRLAQPYVGVFLKR

SEQ ID NO: 28233 - protein, 36 aa, Artificial Sequence
  Quasi-synthetic sequence derived from human genome
RKLFIQRAKKIDKISRIGFPMAFLIFNMFYWIIYKI

SEQ ID NO: 28234 - protein, 36 aa, Artificial Sequence
  Quasi-synthetic sequence derived from human genome
VPPLMNPIIYSIKTKQIRQRIIKKFQFIKSLRCFWK

SEQ ID NO: 28235 - protein, 36 aa, Artificial Sequence
  Quasi-synthetic sequence derived from human genome
FLILLATAVILGSAVLLFHFCIFHRRKMKAIRRSLK

SEQ ID NO: 28236 - protein, 36 aa, Artificial Sequence
  Quasi-synthetic sequence derived from human genome
RKYKKNIKALYIVHPTMFIKTLLILFKPLISFKFGQ

SEQ ID NO: 28237 - protein, 36 aa, Artificial Sequence
  Quasi-synthetic sequence derived from human genome
KIAGVIAGILLFVIIFLGVVLVMKKRKLAKKRKETM

SEQ ID NO: 28238 - protein, 36 aa, Artificial Sequence
  Quasi-synthetic sequence derived from human genome
LVRKQMRLQRKAVISLQSYFRMRKARQYYLKMYKAI

SEQ ID NO: 28239 - protein, 36 aa, Artificial Sequence
  Quasi-synthetic sequence derived from human genome
VTLFVKRLRRKTYLSNMAKTMRMVLKSKRRVSVLKS

SEQ ID NO: 28240 - protein, 36 aa, Artificial Sequence
  Quasi-synthetic sequence derived from human genome
QKTARLFSKKIFCCLFFITLFFIRLLSYMFFHVRFI

SEQ ID NO: 28241 - protein, 36 aa, Artificial Sequence
  Quasi-synthetic sequence derived from human genome
YQKLLKYYVLNALKHRPPKAQKKRYLFRSFKATKFF

SEQ ID NO: 28242 - protein, 36 aa, Artificial Sequence
  Quasi-synthetic sequence derived from human genome
LLKRFNKEKLGLLLLTFLGIVAAVLVKKYQAVLRRK

SEQ ID NO: 28243 - protein, 36 aa, Artificial Sequence
  Quasi-synthetic sequence derived from human genome
WKVSAVTLAYLIFCLCSLVGILHLQRALVLRRKRKR

SEQ ID NO: 28244 - protein, 36 aa, Artificial Sequence
  Quasi-synthetic sequence derived from human genome
AILRVIRLVRVFRIFKLSRHSKGLQILGQTLKASMR

SEQ ID NO: 28245 - protein, 36 aa, Artificial Sequence
  Quasi-synthetic sequence derived from human genome
AILRVIRLVRVFRIFKLSRHSKGLQILGKTLQASMR

SEQ ID NO: 28246 - protein, 36 aa, Artificial Sequence
  Quasi-synthetic sequence derived from human genome
WWRGTLGRRKAAKRKWAAQTIRRLIRGFVLRHAPRC

SEQ ID NO: 28247 - protein, 36 aa, Artificial Sequence
  Quasi-synthetic sequence derived from human genome
RLPIRMAKALGKRTAKYRWFAVLYLLVCFLLLPSLV

SEQ ID NO: 28248 - protein, 36 aa, Artificial Sequence
  Quasi-synthetic sequence derived from human genome
TIRRKTKDAFYKNIVKKGYLLKKGKGKRWKNLYFIL

SEQ ID NO: 28249 - protein, 36 aa, Artificial Sequence
  Quasi-synthetic sequence derived from human genome
KLSMIRFRYRILRSQHFRTKSKVCKLRKAQRSWVQK

SEQ ID NO: 28250 - protein, 36 aa, Artificial Sequence
  Quasi-synthetic sequence derived from human genome
RAYLVRKAFRHRLWAVLTVQAYARGMIARRLHQRLR

SEQ ID NO: 28251 - protein, 36 aa, Artificial Sequence
  Quasi-synthetic sequence derived from human genome
RKLHQQYRLARQRIIQFQARCRAYLVRKAFRHRLWA

SEQ ID NO: 28252 - protein, 36 aa, Artificial Sequence
  Quasi-synthetic sequence derived from human genome
FLPARQLWKWFGKPTQRRGMKGKARKLFYKAIVRGK

SEQ ID NO: 28253 - protein, 36 aa, Artificial Sequence
  Quasi-synthetic sequence derived from human genome
FFAFVLLLSGALAYCLALQLYVRRRKKLPSVLLFKK

SEQ ID NO: 28254 - protein, 36 aa, Artificial Sequence
  Quasi-synthetic sequence derived from human genome
KKAIKYQSKARRKLMFIIICVIVLLVILGIILATTL

SEQ ID NO: 28255 - protein, 36 aa, Artificial Sequence
  Quasi-synthetic sequence derived from human genome
ISAVVGILLVVVLGVVFGILIKRRQQKIRKYTMRRL

SEQ ID NO: 28256 - protein, 36 aa, Artificial Sequence
  Quasi-synthetic sequence derived from human genome
RRLRKNLKSLIIVHPSWFIRTVLAISRPFISVKFIN

SEQ ID NO: 28257 - protein, 36 aa, Artificial Sequence
  Quasi-synthetic sequence derived from human genome
KLFTLVSACIPVFRLARRRKKILFYCHFPDLLLTKR

SEQ ID NO: 28258 - protein, 36 aa, Artificial Sequence
  Quasi-synthetic sequence derived from human genome
MAKLWFKFQRYFRRKPVRFFTFLALYLTAGSLVFLH

SEQ ID NO: 28259 - protein, 36 aa, Artificial Sequence
  Quasi-synthetic sequence derived from human genome
LILFMFRRLRQFRQAQPTPQYRFRKRDKVMFYGRKI

SEQ ID NO: 28260 - protein, 36 aa, Artificial Sequence
  Quasi-synthetic sequence derived from human genome
RTRGVGKVPRKKVNVKVFIIIAVFFICFVPFHFARI

SEQ ID NO: 28261 - protein, 36 aa, Artificial Sequence
  Quasi-synthetic sequence derived from human genome
RRKTAKMLMVVLLVFALCYLPISVLNVLKRVFGMFR

SEQ ID NO: 28262 - protein, 36 aa, Artificial Sequence
  Quasi-synthetic sequence derived from human genome
VVYIFFDIKLLRNIPRWTHLLRLLRLIILLRIFHLF

SEQ ID NO: 28263 - protein, 36 aa, Artificial Sequence
  Quasi-synthetic sequence derived from human genome
AFHRWKVVLLVRTDKRSDSLIRKKFRMMKIPKPILF

SEQ ID NO: 28264 - protein, 36 aa, Artificial Sequence
  Quasi-synthetic sequence derived from human genome
ARRGWRRAPLRRGVGSSPRARRLMRPLWLLLAVGVF

SEQ ID NO: 28265 - protein, 36 aa, Artificial Sequence
  Quasi-synthetic sequence derived from human genome
WRFIRVFIKTIRRDIFGGLVLLKVKAKVRQCLQERR

SEQ ID NO: 28266 - protein, 36 aa, Artificial Sequence
  Quasi-synthetic sequence derived from human genome
PSKAERKITSRPFTRFRTAVRVVIAILRLRFLVKKW

SEQ ID NO: 28267 - protein, 36 aa, Artificial Sequence
  Quasi-synthetic sequence derived from human genome
VIGFLLACVATVIFVVTKFCLFCFWKFARKGKKGKR

SEQ ID NO: 28268 - protein, 36 aa, Artificial Sequence
  Quasi-synthetic sequence derived from human genome
KLRIRTKAAVKIQAWWRGTLVRRTLLHAALRAWIIQ

SEQ ID NO: 28269 - protein, 36 aa, Artificial Sequence
  Quasi-synthetic sequence derived from human genome
KRRPKRREIPLKVLVKAVLFACMLMRKTMASRVRVT

SEQ ID NO: 28270 - protein, 36 aa, Artificial Sequence
  Quasi-synthetic sequence derived from human genome
RRKSNPKPLVLSEARKQLMIYRLPQVLRLHLKRFRW

SEQ ID NO: 28271 - protein, 36 aa, Artificial Sequence
  Quasi-synthetic sequence derived from human genome
KSFFRQLNLYGFRKRRQCTFRTFTRIFSAKRLVSIL

SEQ ID NO: 28272 - protein, 36 aa, Artificial Sequence
  Quasi-synthetic sequence derived from human genome
IILVLCLRLLQSRCPRVLPKKLQNWNFLPLWMRSLK

SEQ ID NO: 28273 - protein, 36 aa, Artificial Sequence
  Quasi-synthetic sequence derived from human genome
IPFLIIVGICLILIVIFMITKFVQDRHRARRNRLRK

SEQ ID NO: 28274 - protein, 36 aa, Artificial Sequence
  Quasi-synthetic sequence derived from human genome
VIGFLLACVATVLFIITKCCLFCFWKFARKGKKGKR

SEQ ID NO: 28275 - protein, 36 aa, Artificial Sequence
  Quasi-synthetic sequence derived from human genome
TALLWRGRIPGRQWIGKHRRPRFVSLRAKQNMIRRL

SEQ ID NO: 28276 - protein, 36 aa, Artificial Sequence
  Quasi-synthetic sequence derived from human genome
RSVVRRRSFSISPVRLRRSRTPLRRRFSRSPIRRKR

SEQ ID NO: 28277 - protein, 36 aa, Artificial Sequence
  Quasi-synthetic sequence derived from human genome
LVIPLLNPFIYSLRNKEVINIMKKIMKKRKFCHILK

SEQ ID NO: 28278 - protein, 36 aa, Artificial Sequence
  Quasi-synthetic sequence derived from human genome
VGFSPLRILRKRNKALRKIRKLQKQGLLQVTPKGFI

SEQ ID NO: 28279 - protein, 36 aa, Artificial Sequence
  Quasi-synthetic sequence derived from human genome
AKKLFVVTAVSAISVIFLAHHFKRKRGKKKGKILPW

SEQ ID NO: 28280 - protein, 36 aa, Artificial Sequence
  Quasi-synthetic sequence derived from human genome
LAIILLIFISLFPEILLIVLKNVRRRSARRNLSCRR

SEQ ID NO: 28281 - protein, 36 aa, Artificial Sequence
  Quasi-synthetic sequence derived from human genome
RYLQRLLLVHGRWSYIRMCKFLRYFFYKNFAFTLVH

SEQ ID NO: 28282 - protein, 36 aa, Artificial Sequence
  Quasi-synthetic sequence derived from human genome
LVWRVLHALLCLHRTLTSWLRVRFGTWNWIWRRCCR

SEQ ID NO: 28283 - protein, 36 aa, Artificial Sequence
  Quasi-synthetic sequence derived from human genome
RGYQARCYAKFLRRTKAATIIQKYWRMYVVRRRYKI

SEQ ID NO: 28284 - protein, 36 aa, Artificial Sequence
  Quasi-synthetic sequence derived from human genome
EKYFVSPTLFRVIRLARIGRILRLIKGAKGIRTLLF

SEQ ID NO: 28285 - protein, 36 aa, Artificial Sequence
  Quasi-synthetic sequence derived from human genome
ISVVKILRVLRVLRPLRAINRAKGLKHVVQCMFVAI

SEQ ID NO: 28286 - protein, 36 aa, Artificial Sequence
  Quasi-synthetic sequence derived from human genome
KEYLRPLKKFLRKLHLPRDLPQKKKLKYMKQSLVVL

SEQ ID NO: 28287 - protein, 36 aa, Artificial Sequence
  Quasi-synthetic sequence derived from human genome
KVGLVLRVLRALRILYVMRLARHSLGLQTLGLTVRR

SEQ ID NO: 28288 - protein, 36 aa, Artificial Sequence
  Quasi-synthetic sequence derived from human genome
ICLRPPRPGLRRQWKCVQRRCLRHLAHRLRRRHQRC

SEQ ID NO: 28289 - protein, 36 aa, Artificial Sequence
  Quasi-synthetic sequence derived from human genome
HRILINLMKYLQKWKRYRPLWKLDKAIVMEKFAAKK

SEQ ID NO: 28290 - protein, 36 aa, Artificial Sequence
  Quasi-synthetic sequence derived from human genome
LRRGVLLVRAPPACLQVLRDAWRRRALRPPRGFRIR

SEQ ID NO: 28291 - protein, 36 aa, Artificial Sequence
  Quasi-synthetic sequence derived from human genome
KHFLRMLIQVCLYFYCKFLWRCLKFVMRKLTGRCEL

SEQ ID NO: 28292 - protein, 36 aa, Artificial Sequence
  Quasi-synthetic sequence derived from human genome
FRCQFANGIFQLWFHFKRYRYRRPGPCWRPIRHCRR

SEQ ID NO: 28293 - protein, 36 aa, Artificial Sequence
  Quasi-synthetic sequence derived from human genome
MRFQQFLFAFFIFIMSLLLISGQRPVNLTMRRKLRK

SEQ ID NO: 28294 - protein, 36 aa, Artificial Sequence
  Quasi-synthetic sequence derived from human genome
FILYFKPSVFRCIALRWVRLLGFAIVYGTIILKLYR

SEQ ID NO: 28295 - protein, 36 aa, Artificial Sequence
  Quasi-synthetic sequence derived from human genome
HVRIRVIKKKKVIMKKRKKLTLTRPTPLVTAGPLVT

SEQ ID NO: 28296 - protein, 36 aa, Artificial Sequence
  Quasi-synthetic sequence derived from human genome
RHAKIKRAITFIMVVAIVFVICFLPSVVVRIRIFWL

SEQ ID NO: 28297 - protein, 36 aa, Artificial Sequence
  Quasi-synthetic sequence derived from human genome
RVLLLFRAAQCSFPVAQWYILQLRWARKVMQKIRMK

SEQ ID NO: 28298 - protein, 36 aa, Artificial Sequence
  Quasi-synthetic sequence derived from human genome
RISITFFRLFRVMRLVKLLSRGEGIRTLLWTFIKSF

SEQ ID NO: 28299 - protein, 36 aa, Artificial Sequence
  Quasi-synthetic sequence derived from human genome
KLSRALRYYYNKRILHKTKGKRFTYKFNFNKLVLVN

SEQ ID NO: 28300 - protein, 36 aa, Artificial Sequence
  Quasi-synthetic sequence derived from human genome
RKQIKRKAPRGFLKRVFKRKKPQLRLEKSGDLLVRF

SEQ ID NO: 28301 - protein, 36 aa, Artificial Sequence
  Quasi-synthetic sequence derived from human genome
WKPSPLIKPFGARKKRSWYLTWKYKLTNQRALRRFC

SEQ ID NO: 28302 - protein, 36 aa, Artificial Sequence
  Quasi-synthetic sequence derived from human genome
RGYLARQRYQQMRRSLVKFRSLVHAYVSRRRYLKLR

SEQ ID NO: 28303 - protein, 36 aa, Artificial Sequence
  Quasi-synthetic sequence derived from human genome
WRLTWRVVSPLLLTIFVAYIILLFWKPLRYKAWNPK

SEQ ID NO: 28304 - protein, 36 aa, Artificial Sequence
  Quasi-synthetic sequence derived from human genome
FLFICPFVLLLLLLISLLCLYWKARKLSTLRSNTRK

SEQ ID NO: 28305 - protein, 36 aa, Artificial Sequence
  Quasi-synthetic sequence derived from human genome
LLIIRSLRQGLRVEKRLKTKAVRMIAIVLAIFLVCF

SEQ ID NO: 28306 - protein, 36 aa, Artificial Sequence
  Quasi-synthetic sequence derived from human genome
FFIFLKILKLLISKLKAHQMCFRDYKYRLAKSTLVL

SEQ ID NO: 28307 - protein, 36 aa, Artificial Sequence
  Quasi-synthetic sequence derived from human genome
LLFARGAPAWLRRRYLRLRYEDLVRQPRAQLRRLLR

SEQ ID NO: 28308 - protein, 36 aa, Artificial Sequence
  Quasi-synthetic sequence derived from human genome
AVSFLVAAICYFRRLHLYSGHKLKWWIGYLQRKFKR

SEQ ID NO: 28309 - protein, 36 aa, Artificial Sequence
  Quasi-synthetic sequence derived from human genome
RIKYIEFKKSTVILQALVRGWLVRKRFLEQRAKIRL

SEQ ID NO: 28310 - protein, 36 aa, Artificial Sequence
  Quasi-synthetic sequence derived from human genome
LRGFLARNRYRKILREHKAVIIQKRVRGWLARTHYK

SEQ ID NO: 28311 - protein, 36 aa, Artificial Sequence
  Quasi-synthetic sequence derived from human genome
IAFWARRASRTRLAAWARRALLSLRSPKARRGKARR

SEQ ID NO: 28312 - protein, 36 aa, Artificial Sequence
  Quasi-synthetic sequence derived from human genome
RGQKKKKVVKYGMGGMIIVLLICIVWFPLLFMSLIK

SEQ ID NO: 28313 - protein, 36 aa, Artificial Sequence
  Quasi-synthetic sequence derived from human genome
RRQKLLLAQLHHRKRVKAAGQIQAWWRGVLVRRTLL

SEQ ID NO: 28314 - protein, 36 aa, Artificial Sequence
  Quasi-synthetic sequence derived from human genome
MPFVPAVAKSIPRKRISLKRPKKCFRNLFHIRRNKT

SEQ ID NO: 28315 - protein, 36 aa, Artificial Sequence
  Quasi-synthetic sequence derived from human genome
PLYYRRAHRRFVTKKALCIRVFQETQKLKKRRRALK

SEQ ID NO: 28316 - protein, 36 aa, Artificial Sequence
  Quasi-synthetic sequence derived from human genome
RYLRASSNRNFLLTMRPFLKRAILVLSYVLVILYFR

SEQ ID NO: 28317 - protein, 36 aa, Artificial Sequence
  Quasi-synthetic sequence derived from human genome
VRFLNLKKTIIKFQAHVRKHQQRQKYKKMKKAAVII

SEQ ID NO: 28318 - protein, 36 aa, Artificial Sequence
  Quasi-synthetic sequence derived from human genome
LSVIKLKNKIKYRAEACIKMQKTIRMWLCKRRHKPR

SEQ ID NO: 28319 - protein, 36 aa, Artificial Sequence
  Quasi-synthetic sequence derived from human genome
SRRFLGKKYRKYYYKSPKPLLRPFLCRICGSRFLSH

SEQ ID NO: 28320 - protein, 36 aa, Artificial Sequence
  Quasi-synthetic sequence derived from human genome
FLLSRKILRLITIRKLFTAIGVLFPSVILVSLPWVR

SEQ ID NO: 28321 - protein, 36 aa, Artificial Sequence
  Quasi-synthetic sequence derived from human genome
LAMFFLLVLILSSVFLFRLFKRRQGRIFPEGKMWKL

SEQ ID NO: 28322 - protein, 36 aa, Artificial Sequence
  Quasi-synthetic sequence derived from human genome
ASWLRRKLRGKRRPVIAFCLLMILSAMAVTRFPPQR

SEQ ID NO: 28323 - protein, 36 aa, Artificial Sequence
  Quasi-synthetic sequence derived from human genome
KLLSVFRQPLSSLWRSLVPLFCWLRATFWLLATKRR

SEQ ID NO: 28324 - protein, 36 aa, Artificial Sequence
  Quasi-synthetic sequence derived from human genome
WIFWKTWIFWKTWIFRKTYIGWKTWIFSGRCGLTGR

SEQ ID NO: 28325 - protein, 36 aa, Artificial Sequence
  Quasi-synthetic sequence derived from human genome
FYLLKIVNFSRLIFHHLKRKAKSVVLVIVLGSLFFL

SEQ ID NO: 28326 - protein, 36 aa, Artificial Sequence
  Quasi-synthetic sequence derived from human genome
LGLFQGPALGLRNHLGRKLRRRKKKKAKRTTNWKII

SEQ ID NO: 28327 - protein, 36 aa, Artificial Sequence
  Quasi-synthetic sequence derived from human genome
TALLSLVLMAGTFFIAFFLRKFKNSRFFPGRIRRVI

SEQ ID NO: 28328 - protein, 36 aa, Artificial Sequence
  Quasi-synthetic sequence derived from human genome
PAAAAPRASGRCVIAPVRAVLRLRRRVCVLRKRRLL

SEQ ID NO: 28329 - protein, 36 aa, Artificial Sequence
  Quasi-synthetic sequence derived from human genome
ALLALALVGVLILFMFRRLRQFRQAQPTPQYRFRKR

SEQ ID NO: 28330 - protein, 36 aa, Artificial Sequence
  Quasi-synthetic sequence derived from human genome
LRRFREMKPRVLQRWSRQILRGLHFLHSRVPPILHR

SEQ ID NO: 28331 - protein, 36 aa, Artificial Sequence
  Quasi-synthetic sequence derived from human genome
KIKSKYASYLSFIKILLKRGGVKVSTKNLIKLFQII

SEQ ID NO: 28332 - protein, 36 aa, Artificial Sequence
  Quasi-synthetic sequence derived from human genome
LAPWKKGLIAVVIIGVIIALLIIAAKCYFLRKAKAK

SEQ ID NO: 28333 - protein, 36 aa, Artificial Sequence
  Quasi-synthetic sequence derived from human genome
FGLLLLVLFILFLTWCRVQKQKHLPLRVSTRRRGSL

SEQ ID NO: 28334 - protein, 36 aa, Artificial Sequence
  Quasi-synthetic sequence derived from human genome
GFLRVVRFVRILRIFKLTRHFVGLRVLGHTLRASTN

SEQ ID NO: 28335 - protein, 36 aa, Artificial Sequence
  Quasi-synthetic sequence derived from human genome
LLRQKLKKVFQQHYTNKIRALRNRLIVLLLECKRSR

SEQ ID NO: 28336 - protein, 36 aa, Artificial Sequence
  Quasi-synthetic sequence derived from human genome
LVVFKSAPILKRALKVKQAMMQLYVLKLLKVQTKYL

SEQ ID NO: 28337 - protein, 36 aa, Artificial Sequence
  Quasi-synthetic sequence derived from human genome
RRRYRKMLEEHKAVILQKYARAWLARRRFQSIRRFV

SEQ ID NO: 28338 - protein, 36 aa, Artificial Sequence
  Quasi-synthetic sequence derived from human genome
KSLRVLRVLRPLKTIKRLPKLKAVFDCVVNSLKNVL

SEQ ID NO: 28339 - protein, 36 aa, Artificial Sequence
  Quasi-synthetic sequence derived from human genome
MLWLMERGGLGKPRGPRHRGLLRVRLGRFISRLLLW

SEQ ID NO: 28340 - protein, 36 aa, Artificial Sequence
  Quasi-synthetic sequence derived from human genome
TLQMVLQRRKFLQMKRRKYGFIYKTHLFGRPTVRVM

SEQ ID NO: 28341 - protein, 36 aa, Artificial Sequence
  Quasi-synthetic sequence derived from human genome
VRGYLARRRIRLWHRGAMVIQATWRGYRVRRNLAHL

SEQ ID NO: 28342 - protein, 36 aa, Artificial Sequence
  Quasi-synthetic sequence derived from human genome
ILKLYRVLQLFLSRTAQRSALLSSGRLLRRLGLLLL

SEQ ID NO: 28343 - protein, 36 aa, Artificial Sequence
  Quasi-synthetic sequence derived from human genome
PWVYLLLRKILLRKFCQMRKRRLREQAPLLPTPTVI

SEQ ID NO: 28344 - protein, 36 aa, Artificial Sequence
  Quasi-synthetic sequence derived from human genome
KAPLWLRAKFQRLLFKLGCYIQKNCGKFLVVGLLIF

SEQ ID NO: 28345 - protein, 36 aa, Artificial Sequence
  Quasi-synthetic sequence derived from human genome
MVRMVRAATLIQALWKGYLVRSLLRSKKKRGKGKAK

SEQ ID NO: 28346 - protein, 36 aa, Artificial Sequence
  Quasi-synthetic sequence derived from human genome
LWRQQVCAIAKVRFLKLKKERKSLWTILLLFGISFI

SEQ ID NO: 28347 - protein, 36 aa, Artificial Sequence
  Quasi-synthetic sequence derived from human genome
KKAIKYQSKARRKKWIIIAVSVVLVAIIALIIGLSV

SEQ ID NO: 28348 - protein, 36 aa, Artificial Sequence
  Quasi-synthetic sequence derived from human genome
FFFIIGLWWCTKSILKYICKKQKRTCYLGSKTLFYR

SEQ ID NO: 28349 - protein, 36 aa, Artificial Sequence
  Quasi-synthetic sequence derived from human genome
LLLVLVLVLLVSPRGCRARRGLRGLLMAHSQRLLFR

SEQ ID NO: 28350 - protein, 36 aa, Artificial Sequence
  Quasi-synthetic sequence derived from human genome
LKQKARRLTILLLLAFYVCFLPFHILRVIRIESRLL

SEQ ID NO: 28351 - protein, 36 aa, Artificial Sequence
  Quasi-synthetic sequence derived from human genome
ILDPWVYLLLRKILLRKFCQMRKRRLREQFWRPASS

SEQ ID NO: 28352 - protein, 36 aa, Artificial Sequence
  Quasi-synthetic sequence derived from human genome
GLLVFFFLIVPLIVCAIFIFIKRDQLWRSYFRKKRS

SEQ ID NO: 28353 - protein, 36 aa, Artificial Sequence
  Quasi-synthetic sequence derived from human genome
RATVRALWFWAFSLQAKVWATWLAFVLERRRKKARL

SEQ ID NO: 28354 - protein, 36 aa, Artificial Sequence
  Quasi-synthetic sequence derived from human genome
LRLTPGLRKVLFATALGTVALALAAHQLKRRRRRKK

SEQ ID NO: 28355 - protein, 36 aa, Artificial Sequence
  Quasi-synthetic sequence derived from human genome
MRKNVRVLSRTSKFRRLRQLLRRRKKRWQGRRGGSR

SEQ ID NO: 28356 - protein, 36 aa, Artificial Sequence
  Quasi-synthetic sequence derived from human genome
FLKVIGKGSFGKVLLAKRKLDGKFYAVKVLQKKIVL

SEQ ID NO: 28357 - protein, 36 aa, Artificial Sequence
  Quasi-synthetic sequence derived from human genome
GRLQHGNMRKNMRVLSRISKFRRLRQLLRRRKKTRQ

SEQ ID NO: 28358 - protein, 36 aa, Artificial Sequence
  Quasi-synthetic sequence derived from human genome
LSIMSKFKLLSSLPHWRRIAQKIIREPRKKRVPKKP

SEQ ID NO: 28359 - protein, 36 aa, Artificial Sequence
  Quasi-synthetic sequence derived from human genome
IFCKKCILRWLARQKTCPCCRKEVKRKKVVHMNKLR

SEQ ID NO: 28360 - protein, 36 aa, Artificial Sequence
  Quasi-synthetic sequence derived from human genome
RYKKNLKALYVVHPTSFIKVLWNILKPLISHKFGKK

SEQ ID NO: 28361 - protein, 36 aa, Artificial Sequence
  Quasi-synthetic sequence derived from human genome
RKYKKNLKALYVVHPTSFIKVLWNILKPLISHKFGK

SEQ ID NO: 28362 - protein, 36 aa, Artificial Sequence
  Quasi-synthetic sequence derived from human genome
LLWKRLLIARRSRKGFFAQIVLPAVFVCIALVFSLI

SEQ ID NO: 28363 - protein, 36 aa, Artificial Sequence
  Quasi-synthetic sequence derived from human genome
TSAAKLKRKYWWKNLKMMIILGVICAIILIIIIVYF

SEQ ID NO: 28364 - protein, 36 aa, Artificial Sequence
  Quasi-synthetic sequence derived from human genome
YKTFLPKCIRAKIQDYHILTRKRIRYRFRRFIQQFS

SEQ ID NO: 28365 - protein, 36 aa, Artificial Sequence
  Quasi-synthetic sequence derived from human genome
WFQFYLTFPLIFGLFIILLVIFLIWRCFLRNKTRRQ

SEQ ID NO: 28366 - protein, 36 aa, Artificial Sequence
  Quasi-synthetic sequence derived from human genome
LYTDLLRRLRAVRLRSGAKALGKARRKVTVLVLVVL

SEQ ID NO: 28367 - protein, 36 aa, Artificial Sequence
  Quasi-synthetic sequence derived from human genome
IIQKRVRGWLARTHYKRSMHAIIYLQCCFRRMMAKR

SEQ ID NO: 28368 - protein, 36 aa, Artificial Sequence
  Quasi-synthetic sequence derived from human genome
IRNMSWPRLIRKLRCYLKEMKNLRKLVFSRCLQNPL

SEQ ID NO: 28369 - protein, 36 aa, Artificial Sequence
  Quasi-synthetic sequence derived from human genome
AKLLFTPQHKMLRLRLPNLKMVRLRVSFSAVVFKAV

SEQ ID NO: 28370 - protein, 36 aa, Artificial Sequence
  Quasi-synthetic sequence derived from human genome
LRVLRMMRIFWVIKLARHFIGLQTLGLTLKRCYREM

SEQ ID NO: 28371 - protein, 36 aa, Artificial Sequence
  Quasi-synthetic sequence derived from human genome
FAKTWRVHAIFKNVKMKKKIIKDQKLLVIVGGMLLI

SEQ ID NO: 28372 - protein, 36 aa, Artificial Sequence
  Quasi-synthetic sequence derived from human genome
YLSLFFWMLFKALLIIYGILVIFRRMMKSRMMVIGF

SEQ ID NO: 28373 - protein, 36 aa, Artificial Sequence
  Quasi-synthetic sequence derived from human genome
KRLPVKRAAVQFLNNAWGIQKKQNAKRFKRRWMVRK

SEQ ID NO: 28374 - protein, 36 aa, Artificial Sequence
  Quasi-synthetic sequence derived from human genome
LRTLLRRRLFSYPTKYYFMVLVLSLITFSVLRIHQK

SEQ ID NO: 28375 - protein, 36 aa, Artificial Sequence
  Quasi-synthetic sequence derived from human genome
NTVYNPVIYVFMIRKFRRSLLQLLCLRLLRCQRPAK

SEQ ID NO: 28376 - protein, 36 aa, Artificial Sequence
  Quasi-synthetic sequence derived from human genome
VPLLVLALASYRRLCLRLRLADCLVPYSRALYRRRR

SEQ ID NO: 28377 - protein, 36 aa, Artificial Sequence
  Quasi-synthetic sequence derived from human genome
HRLCKLLFFRIRPIFVFDGDAPLLKKQTLVKRRQRK

SEQ ID NO: 28378 - protein, 36 aa, Artificial Sequence
  Quasi-synthetic sequence derived from human genome
FILPVLGAVLALLFLLLVLLLLVRKKRKIKEPLLLP

SEQ ID NO: 28379 - protein, 36 aa, Artificial Sequence
  Quasi-synthetic sequence derived from human genome
LWWFWLLWTVLILFSCCCAFRHRRAKLRLQQQQRQR

SEQ ID NO: 28380 - protein, 36 aa, Artificial Sequence
  Quasi-synthetic sequence derived from human genome
LLLIKKVTWTMNGLMLPTDIKRRKTKPVLSIRMKKL

SEQ ID NO: 28381 - protein, 36 aa, Artificial Sequence
  Quasi-synthetic sequence derived from human genome
RTTRRWKRWFKFRKRKGEKRPRPNHKAVARRAKLKF

SEQ ID NO: 28382 - protein, 36 aa, Artificial Sequence
  Quasi-synthetic sequence derived from human genome
SAAKLKRKYWWKNCKMWAIGITVLVIFIIIIIVWVV

SEQ ID NO: 28383 - protein, 36 aa, Artificial Sequence
  Quasi-synthetic sequence derived from human genome
WRVIGYHVVVWMMAGIPLLLFRWKPLWGVRLRLRPC

SEQ ID NO: 28384 - protein, 36 aa, Artificial Sequence
  Quasi-synthetic sequence derived from human genome
LRKYIYIRSCVVIIQKRFRCFQAQKLYKRRKESILT

SEQ ID NO: 28385 - protein, 36 aa, Artificial Sequence
  Quasi-synthetic sequence derived from human genome
RIDSEVYKTARALRIVRFTKILSLLRLLRLSRLIRY

SEQ ID NO: 28386 - protein, 36 aa, Artificial Sequence
  Quasi-synthetic sequence derived from human genome
RALRYYYNKRILHKTKGKRFTYKFNFSKLIVVNYPL

SEQ ID NO: 28387 - protein, 36 aa, Artificial Sequence
  Quasi-synthetic sequence derived from human genome
KNIFITMFATFFFFKLLIKVFLALLTHFYIVKGNRK

SEQ ID NO: 28388 - protein, 36 aa, Artificial Sequence
  Quasi-synthetic sequence derived from human genome
KYKKNLKALYVVHPTSFIKVLWNILKPLISHKFGKK

SEQ ID NO: 28389 - protein, 36 aa, Artificial Sequence
  Quasi-synthetic sequence derived from human genome
MRKNMRVLSRTSKFRRLRQLLRRRKKRQQVRSISAC

SEQ ID NO: 28390 - protein, 36 aa, Artificial Sequence
  Quasi-synthetic sequence derived from human genome
HLLKIKNTFCLWKRLIKLKDNHCEQLRVKIRKLKNK

SEQ ID NO: 28391 - protein, 36 aa, Artificial Sequence
  Quasi-synthetic sequence derived from human genome
LLKIKNTFCLWKRLIKLKDNHCEQLRVKIRKLKNKA

SEQ ID NO: 28392 - protein, 36 aa, Artificial Sequence
  Quasi-synthetic sequence derived from human genome
ALGLLILLRLWRVARIINGIIISVKTRSERQLLRLK

SEQ ID NO: 28393 - protein, 36 aa, Artificial Sequence
  Quasi-synthetic sequence derived from human genome
KAASLIQAMWRRYRAKKYLCKVKAACKIQAWYRCWR

SEQ ID NO: 28394 - protein, 36 aa, Artificial Sequence
  Quasi-synthetic sequence derived from human genome
SLFLLQYFVPLGFILICYLKIVICLRRRNAKVDKKK

SEQ ID NO: 28395 - protein, 36 aa, Artificial Sequence
  Quasi-synthetic sequence derived from human genome
AVLPLALGLAITALLLLMVACRLRLVKQKLKKARPI

SEQ ID NO: 28396 - protein, 36 aa, Artificial Sequence
  Quasi-synthetic sequence derived from human genome
ARLRQKVAVKKLSRPFQSLIHARRTYRELRLLKHLK

SEQ ID NO: 28397 - protein, 36 aa, Artificial Sequence
  Quasi-synthetic sequence derived from human genome
YVVGWIIAISLLVGILIFLLLAVLLWKMGFFRRRYK

SEQ ID NO: 28398 - protein, 36 aa, Artificial Sequence
  Quasi-synthetic sequence derived from human genome
KIQSWFRGCQVRAYIRHLNRIVTIIQKWWRSFLGRK

SEQ ID NO: 28399 - protein, 36 aa, Artificial Sequence
  Quasi-synthetic sequence derived from human genome
VLGIMAKLLPLRALPLLFNLIKVVPRVFGRMVGKSR

SEQ ID NO: 28400 - protein, 36 aa, Artificial Sequence
  Quasi-synthetic sequence derived from human genome
WKKKKSMIGMSTKLWKVKKALKMTIFWRGLMPEFQF

SEQ ID NO: 28401 - protein, 36 aa, Artificial Sequence
  Quasi-synthetic sequence derived from human genome
RITLRFFASVLIRRIHKVDIPSIITKKLLKAAMKHI

SEQ ID NO: 28402 - protein, 36 aa, Artificial Sequence
  Quasi-synthetic sequence derived from human genome
ILQSRIRMIIAVTSYKRYLWATVTIQRHWRAYLRRK

SEQ ID NO: 28403 - protein, 36 aa, Artificial Sequence
  Quasi-synthetic sequence derived from human genome
IIKILLRRPNEKKSKAVRLIFVIMIIFFLFWTPYNL

SEQ ID NO: 28404 - protein, 36 aa, Artificial Sequence
  Quasi-synthetic sequence derived from human genome
LFPEFRPGKVLRFLRLFGPGKNVPSVWRSARRKRKK

SEQ ID NO: 28405 - protein, 36 aa, Artificial Sequence
  Quasi-synthetic sequence derived from human genome
KQGYVKIRSRKLGIFRRCWLVFKKASSKGPRRLEKF

SEQ ID NO: 28406 - protein, 36 aa, Artificial Sequence
  Quasi-synthetic sequence derived from human genome
WLAIILLIFISLFPEILLIVLKNVRRRSARVTKRLP

SEQ ID NO: 28407 - protein, 36 aa, Artificial Sequence
  Quasi-synthetic sequence derived from human genome
RWKPFLYRGRICRRLSVVFAGMIELTFFILSAFKLR

SEQ ID NO: 28408 - protein, 36 aa, Artificial Sequence
  Quasi-synthetic sequence derived from human genome
RRHLKSMHSSATLIQSRFRSLLVRRRFISLKKATIF

SEQ ID NO: 28409 - protein, 36 aa, Artificial Sequence
  Quasi-synthetic sequence derived from human genome
LGLLVAGVLVLLVSLGVAIHLCCRRRRARLRFMKQF

SEQ ID NO: 28410 - protein, 36 aa, Artificial Sequence
  Quasi-synthetic sequence derived from human genome
RHLGVVIGILVAVILLLLLLLLLFLILRHRRQGKHW

SEQ ID NO: 28411 - protein, 36 aa, Artificial Sequence
  Quasi-synthetic sequence derived from human genome
PLALAPRKPQPCRCRRRVRPSIRLLSPVLSLILLLI

SEQ ID NO: 28412 - protein, 36 aa, Artificial Sequence
  Quasi-synthetic sequence derived from human genome
LSLPKTPKMLKMSKGLDARSKRWLKIIWRRHGIWPL

SEQ ID NO: 28413 - protein, 36 aa, Artificial Sequence
  Quasi-synthetic sequence derived from human genome
HLFQMPLFLKLFICFIFIRSSPTIVSNKRVSKRKFI

SEQ ID NO: 28414 - protein, 36 aa, Artificial Sequence
  Quasi-synthetic sequence derived from human genome
KKGKIVLLFSLLCWVLFNLGIGFVKPATLRCVPKIR

SEQ ID NO: 28415 - protein, 36 aa, Artificial Sequence
  Quasi-synthetic sequence derived from human genome
RYFRIQEVLKHARHFRGRKNRCYRLAVRTVIRAFVK

SEQ ID NO: 28416 - protein, 36 aa, Artificial Sequence
  Quasi-synthetic sequence derived from human genome
RCRRLRAIYTIMRWFRRHKVRAHLAELQRRFQAARQ

SEQ ID NO: 28417 - protein, 36 aa, Artificial Sequence
  Quasi-synthetic sequence derived from human genome
VFAVMLSILSLIGIFNRSFRTGIKRRILLLIPKWLY

SEQ ID NO: 28418 - protein, 36 aa, Artificial Sequence
  Quasi-synthetic sequence derived from human genome
WRLPRISARAPYRLRRLRRHTYWPPRRPVAASRCWP

SEQ ID NO: 28419 - protein, 36 aa, Artificial Sequence
  Quasi-synthetic sequence derived from human genome
LMRRILTRNEKNRPRRRFLCHLSRQQLRMAMRIPVL

SEQ ID NO: 28420 - protein, 36 aa, Artificial Sequence
  Quasi-synthetic sequence derived from human genome
SLRFKRTHIKMKKQPKGYGLRCHRAIITICRLIGIK

SEQ ID NO: 28421 - protein, 36 aa, Artificial Sequence
  Quasi-synthetic sequence derived from human genome
IRRKVSKIQRFHARSLWTNHKRYGYKKHSYRLVKKL

SEQ ID NO: 28422 - protein, 36 aa, Artificial Sequence
  Quasi-synthetic sequence derived from human genome
QTQFFHVKVLNINLKRKFIKKRIIIISNYSKRNSLL

SEQ ID NO: 28423 - protein, 36 aa, Artificial Sequence
  Quasi-synthetic sequence derived from human genome
KLSRALRYYYNKRILHKTKGKRFTYKFNFSKVVLVN

SEQ ID NO: 28424 - protein, 36 aa, Artificial Sequence
  Quasi-synthetic sequence derived from human genome
FRAFRRANARCFWNARLARAASRLAFQGWLRRGVLL

SEQ ID NO: 28425 - protein, 36 aa, Artificial Sequence
  Quasi-synthetic sequence derived from human genome
ITLGLLVAGVLVLLVSLGVAIHLCCRRRRARLRFMK

SEQ ID NO: 28426 - protein, 36 aa, Artificial Sequence
  Quasi-synthetic sequence derived from human genome
WLVWGVILFVYLVIRALRLWRTAKLQVTLKKYSVHL

SEQ ID NO: 28427 - protein, 36 aa, Artificial Sequence
  Quasi-synthetic sequence derived from human genome
KTSFKDCIPRSFRRHIRQHSALTRLRLRNVFRRFLR

SEQ ID NO: 28428 - protein, 36 aa, Artificial Sequence
  Quasi-synthetic sequence derived from human genome
KRWALVWLACLLFAAALSLILLLKKDHAKGWLRLLK

SEQ ID NO: 28429 - protein, 36 aa, Artificial Sequence
  Quasi-synthetic sequence derived from human genome
LCRRAVKILKKKKLRRIPNGEANVKKEIQLLRRLRH

SEQ ID NO: 28430 - protein, 36 aa, Artificial Sequence
  Quasi-synthetic sequence derived from human genome
VYLLLRKILLRKFCQMRKRRLREQLICSLQNSQIQR

SEQ ID NO: 28431 - protein, 36 aa, Artificial Sequence
  Quasi-synthetic sequence derived from human genome
WRRYRAKKYLCKVKAACKIQAWYRCWRAHKEYLAIL

SEQ ID NO: 28432 - protein, 36 aa, Artificial Sequence
  Quasi-synthetic sequence derived from human genome
NRVAKMGLILAIRSILLVIPFPFTLRRLKYCQKNLL

SEQ ID NO: 28433 - protein, 36 aa, Artificial Sequence
  Quasi-synthetic sequence derived from human genome
LVLPSIVILGKIILFLPCISRKLKRIKKGWEKSQFL

SEQ ID NO: 28434 - protein, 36 aa, Artificial Sequence
  Quasi-synthetic sequence derived from human genome
LRALRLLRIFKVTKYWASLRNLVVSLLNSMKSIISL

SEQ ID NO: 28435 - protein, 36 aa, Artificial Sequence
  Quasi-synthetic sequence derived from human genome
VILAFLAAVAAVLISLMWVCNKCAYKFQRKRRHKLK

SEQ ID NO: 28436 - protein, 36 aa, Artificial Sequence
  Quasi-synthetic sequence derived from human genome
MIHLPIYRHLRRFILSVIVFGSIVLLMLWLPIRIIK

SEQ ID NO: 28437 - protein, 36 aa, Artificial Sequence
  Quasi-synthetic sequence derived from human genome
VPRPRGKLAGLLRTFMRSRPSRQRLRQRGILRQRVF

SEQ ID NO: 28438 - protein, 36 aa, Artificial Sequence
  Quasi-synthetic sequence derived from human genome
ARKRTAKRAALMILTVWTISIFISMPPLFWRSHRRL

SEQ ID NO: 28439 - protein, 36 aa, Artificial Sequence
  Quasi-synthetic sequence derived from human genome
LWKNVTLKRRSPWVLAFEIFIPLVLFFILLGLRQKK

SEQ ID NO: 28440 - protein, 36 aa, Artificial Sequence
  Quasi-synthetic sequence derived from human genome
AKLLAKKRVVRMLLVIVVLFFLCWLPVYSANTWRAF

SEQ ID NO: 28441 - protein, 36 aa, Artificial Sequence
  Quasi-synthetic sequence derived from human genome
RKYISKYSVFLRHRYQSRSAFLGRYLKKKKSVVSRL

SEQ ID NO: 28442 - protein, 36 aa, Artificial Sequence
  Quasi-synthetic sequence derived from human genome
LYKRYGGFLRRIRPKLKWDNQKRYGGFLRRQFKVVT

SEQ ID NO: 28443 - protein, 36 aa, Artificial Sequence
  Quasi-synthetic sequence derived from human genome
RRRRRAKITGRERKAMRVLPVVVGAFLLCWTPFFVV

SEQ ID NO: 28444 - protein, 36 aa, Artificial Sequence
  Quasi-synthetic sequence derived from human genome
FLALFKAAEFAKLSIKWMIKIRKRYLKRRGQATSHI

SEQ ID NO: 28445 - protein, 36 aa, Artificial Sequence
  Quasi-synthetic sequence derived from human genome
LMMLVCGLVWVPIIKKKQKHRQKSNFLRSLKSFFLT

SEQ ID NO: 28446 - protein, 36 aa, Artificial Sequence
  Quasi-synthetic sequence derived from human genome
IRHHVLTWVKFIIGYLFPLLTMSICYLCLIFKVKKR

SEQ ID NO: 28447 - protein, 36 aa, Artificial Sequence
  Quasi-synthetic sequence derived from human genome
WKVAHLKEHRRVFQAMWLSFLKHKLPLSLYKKVLLI

SEQ ID NO: 28448 - protein, 36 aa, Artificial Sequence
  Quasi-synthetic sequence derived from human genome
CLVLLALCLLLPLLLLGGWKRWRRGRAARHVVAVVL

SEQ ID NO: 28449 - protein, 36 aa, Artificial Sequence
  Quasi-synthetic sequence derived from human genome
ALCTLRGRRCHCLPFPKRGMQRWMLPLRRGARLLPL

SEQ ID NO: 28450 - protein, 36 aa, Artificial Sequence
  Quasi-synthetic sequence derived from human genome
KLLERAGLVLRLLRALRVLYVMRLARHSLGLRSLGL

SEQ ID NO: 28451 - protein, 36 aa, Artificial Sequence
  Quasi-synthetic sequence derived from human genome
NLFFLLSLGIILFCYVEILRTLFRSRSKRRHRTVKL

SEQ ID NO: 28452 - protein, 36 aa, Artificial Sequence
  Quasi-synthetic sequence derived from human genome
VKKNTLKKYKIACIVLLALLVIMSLGLGLGLGLRKL

SEQ ID NO: 28453 - protein, 36 aa, Artificial Sequence
  Quasi-synthetic sequence derived from human genome
VVWAIFRPGTSFGISVLRALRLLRIFKITKYWASLR

SEQ ID NO: 28454 - protein, 36 aa, Artificial Sequence
  Quasi-synthetic sequence derived from human genome
IFIYQLCNNRKSFRLRRRDLLLGFNKRAIDKCWKIR

SEQ ID NO: 28455 - protein, 36 aa, Artificial Sequence
  Quasi-synthetic sequence derived from human genome
RRELSLGRKKAPHRLCGRFSRISMKLPRIPLRRQKL

SEQ ID NO: 28456 - protein, 36 aa, Artificial Sequence
  Quasi-synthetic sequence derived from human genome
TIYSTFGAFYIPLLLMLVLYGRIFRAARFRIRKTVK

SEQ ID NO: 28457 - protein, 36 aa, Artificial Sequence
  Quasi-synthetic sequence derived from human genome
RWVRQQGPRVRRGISRLWLRVLLRLSPMAFRALQGC

SEQ ID NO: 28458 - protein, 36 aa, Artificial Sequence
  Quasi-synthetic sequence derived from human genome
RLRRANRVLRARCRRAVKSNACYWAVLLLVFLNTLT

SEQ ID NO: 28459 - protein, 36 aa, Artificial Sequence
  Quasi-synthetic sequence derived from human genome
RWFRVLLCRQHFLHLRQASVIIQRFWRNYLNQKQVR

SEQ ID NO: 28460 - protein, 36 aa, Artificial Sequence
  Quasi-synthetic sequence derived from human genome
SKTRLKSQLLLQKYIAQRKWKKHFYVVTAANRLRKF

SEQ ID NO: 28461 - protein, 36 aa, Artificial Sequence
  Quasi-synthetic sequence derived from human genome
LPKGVVLKLKPVATRFPRKAWRQKRSSVLKPLLIQP

SEQ ID NO: 28462 - protein, 36 aa, Artificial Sequence
  Quasi-synthetic sequence derived from human genome
LVRNRRFQLCRCMNPRARKNRSQIALFQKLRFQFFC

SEQ ID NO: 28463 - protein, 36 aa, Artificial Sequence
  Quasi-synthetic sequence derived from human genome
IAGLLMFIIILLGVMLTIKRRRNAYSYSYYLKLAKK

SEQ ID NO: 28464 - protein, 36 aa, Artificial Sequence
  Quasi-synthetic sequence derived from human genome
IGLRKTFWFFFQRHKLKGTSFLLGGVVIVLLRWPLL

SEQ ID NO: 28465 - protein, 36 aa, Artificial Sequence
  Quasi-synthetic sequence derived from human genome
RIKTSIFSLFRAPKLRMRVFGLCFVRFAITVPFYGL

SEQ ID NO: 28466 - protein, 36 aa, Artificial Sequence
  Quasi-synthetic sequence derived from human genome
RHLGVVIGILVAVVLLLLLLLLLFLILRHRRQGKHW

SEQ ID NO: 28467 - protein, 36 aa, Artificial Sequence
  Quasi-synthetic sequence derived from human genome
RRIRYEFKAKNIKKKKVSIMVSVDGVKVILKKKKKK

SEQ ID NO: 28468 - protein, 36 aa, Artificial Sequence
  Quasi-synthetic sequence derived from human genome
ARPWPRWLGVAALGLAAVALGTVAWRRAWPRRRRRL

SEQ ID NO: 28469 - protein, 36 aa, Artificial Sequence
  Quasi-synthetic sequence derived from human genome
KPLREWFVIVIMATICFILLILSLICKIKLGPVRRK

SEQ ID NO: 28470 - protein, 36 aa, Artificial Sequence
  Quasi-synthetic sequence derived from human genome
RYRLIREFHSRPALAPPFIVISHLRLLLRQLCRRPR

SEQ ID NO: 28471 - protein, 36 aa, Artificial Sequence
  Quasi-synthetic sequence derived from human genome
LVLRYRHKRLSYQSVFLFLCLFWASLRTVLFSFYFK

SEQ ID NO: 28472 - protein, 36 aa, Artificial Sequence
  Quasi-synthetic sequence derived from human genome
VISIVDPWIFIIFRSPVFRIFFHKIFIRPLRYRSRC

SEQ ID NO: 28473 - protein, 36 aa, Artificial Sequence
  Quasi-synthetic sequence derived from human genome
RSVWNFLKRHKKKCIFLGTVLGGVYILGKYGQKKIR

SEQ ID NO: 28474 - protein, 36 aa, Artificial Sequence
  Quasi-synthetic sequence derived from human genome
RIGRILRLIRAAKGIRTLLFALMMSLPALFNIGLLL

SEQ ID NO: 28475 - protein, 36 aa, Artificial Sequence
  Quasi-synthetic sequence derived from human genome
INPMCYALCNKAFRDTFRLLLLCRWDKRRWRKIPKR

SEQ ID NO: 28476 - protein, 36 aa, Artificial Sequence
  Quasi-synthetic sequence derived from human genome
LVNLIHLFIFRKSNFIFDKLHKVGIKTRRQWRRSQF

SEQ ID NO: 28477 - protein, 36 aa, Artificial Sequence
  Quasi-synthetic sequence derived from human genome
CFYVYGARLYCLKIHGLSSLWRLFRGKKWNVLRQRV

SEQ ID NO: 28478 - protein, 36 aa, Artificial Sequence
  Quasi-synthetic sequence derived from human genome
LGLLVAGVLVLLVSLGVAMHLCCRRRRARLRFMKQF

SEQ ID NO: 28479 - protein, 36 aa, Artificial Sequence
  Quasi-synthetic sequence derived from human genome
LLLWKMRLFQRQWANSFFQGLQQRMLQRSLRWWHLR

SEQ ID NO: 28480 - protein, 36 aa, Artificial Sequence
  Quasi-synthetic sequence derived from human genome
CRKNYGLMRLGFLRLQALHRSRKLHQQYRLARQRII

SEQ ID NO: 28481 - protein, 36 aa, Artificial Sequence
  Quasi-synthetic sequence derived from human genome
RGRRLGLALGLLLALVLAPRVLRAKPTVRKERVVRP

SEQ ID NO: 28482 - protein, 36 aa, Artificial Sequence
  Quasi-synthetic sequence derived from human genome
FRVAKKRAPKVLGTTLVVGLLAGVGYFAFMLFRKRL

SEQ ID NO: 28483 - protein, 36 aa, Artificial Sequence
  Quasi-synthetic sequence derived from human genome
IVLAKKMLRKALKLLNRIFPYNLISLFLHIHVEKNR

SEQ ID NO: 28484 - protein, 36 aa, Artificial Sequence
  Quasi-synthetic sequence derived from human genome
RQRVLPRMQARMRGFQARKRYLRRRAALGQLNTILL

SEQ ID NO: 28485 - protein, 36 aa, Artificial Sequence
  Quasi-synthetic sequence derived from human genome
AHPFLLLILLCMSLLLFQVIRLYQRRRWMIRALHLF

SEQ ID NO: 28486 - protein, 36 aa, Artificial Sequence
  Quasi-synthetic sequence derived from human genome
RLRHPRTRWKNWWVRGILTLAMIAFFFIIIYLGPMV

SEQ ID NO: 28487 - protein, 36 aa, Artificial Sequence
  Quasi-synthetic sequence derived from human genome
KKRNSTLYITMLLIVPVIVAGAIIVLLLYLKRLKII

SEQ ID NO: 28488 - protein, 36 aa, Artificial Sequence
  Quasi-synthetic sequence derived from human genome
KWKIFTNFKMNILGLLIPFTIFMFCYIKILHQLKRC

SEQ ID NO: 28489 - protein, 36 aa, Artificial Sequence
  Quasi-synthetic sequence derived from human genome
FLLAILGGMAFILLVLLCLLLYYCRRKCLKPRQHHR

SEQ ID NO: 28490 - protein, 36 aa, Artificial Sequence
  Quasi-synthetic sequence derived from human genome
LLRRLKLVKMYRSKNDLSQLQLLIKKWRSCSQLLLY

SEQ ID NO: 28491 - protein, 36 aa, Artificial Sequence
  Quasi-synthetic sequence derived from human genome
GKINRPRTELKKKLFKRRRVLNRERRLRHRVVGAVI

SEQ ID NO: 28492 - protein, 36 aa, Artificial Sequence
  Quasi-synthetic sequence derived from human genome
MLLRKRYRHRPCRLQFLLLLLMLGCVLMMVAMLHPP

SEQ ID NO: 28493 - protein, 36 aa, Artificial Sequence
  Quasi-synthetic sequence derived from human genome
RRGFFTKLPPAERRYFKRVVLAARTKRGHLVLKSFK

SEQ ID NO: 28494 - protein, 36 aa, Artificial Sequence
  Quasi-synthetic sequence derived from human genome
KNWKIILCLFIIPLVGCGFVSFRKKPVDKHKKLLWY

SEQ ID NO: 28495 - protein, 36 aa, Artificial Sequence
  Quasi-synthetic sequence derived from human genome
FWRNKKSNKVLPMRRVLRKRPSPAPRTIRIEWLKSK

SEQ ID NO: 28496 - protein, 36 aa, Artificial Sequence
  Quasi-synthetic sequence derived from human genome
LKEGLRAWKRIFWRQILLTLGLLGLFLYGLPKFRHL

SEQ ID NO: 28497 - protein, 36 aa, Artificial Sequence
  Quasi-synthetic sequence derived from human genome
LKVFYKFLNSNRHTIRHTGKKCFKCKKCVKSFCIRL

SEQ ID NO: 28498 - protein, 36 aa, Artificial Sequence
  Quasi-synthetic sequence derived from human genome
LYMLFLLVLVFFLMGLVGFMICHVLKKKGYRCRTSR

SEQ ID NO: 28499 - protein, 36 aa, Artificial Sequence
  Quasi-synthetic sequence derived from human genome
LSKKTLLRFWLPFGFILILVIFVTGLLLRKPNTYPK

SEQ ID NO: 28500 - protein, 36 aa, Artificial Sequence
  Quasi-synthetic sequence derived from human genome
LRTFRLLRVLKLVRFMPALRRQLVVLMKTMDNVATF

SEQ ID NO: 28501 - protein, 36 aa, Artificial Sequence
  Quasi-synthetic sequence derived from human genome
TRNLVLKNRSLKLQKMKYRPPKTKFFFTVIPQPIFL

SEQ ID NO: 28502 - protein, 36 aa, Artificial Sequence
  Quasi-synthetic sequence derived from human genome
IMNKDLLRRVLVLMNSKHTFLALCALRFMRRIIGLK

SEQ ID NO: 28503 - protein, 36 aa, Artificial Sequence
  Quasi-synthetic sequence derived from human genome
KKKIFVFLEHQTKVLKKRHTKEKVLRRAKRRWAPIP

SEQ ID NO: 28504 - protein, 36 aa, Artificial Sequence
  Quasi-synthetic sequence derived from human genome
RHPAWWFMSVKVKLKRKKRQKTPNRKLPRRGAPTLR

SEQ ID NO: 28505 - protein, 36 aa, Artificial Sequence
  Quasi-synthetic sequence derived from human genome
AKILGVLRVLRLLRTLRPLRVISRAPGLKLVVETLI

SEQ ID NO: 28506 - protein, 36 aa, Artificial Sequence
  Quasi-synthetic sequence derived from human genome
ILIMRLKMFLTPHMCVMASLICSRQLFGWLFRRVRF

SEQ ID NO: 28507 - protein, 36 aa, Artificial Sequence
  Quasi-synthetic sequence derived from human genome
VIRIRGINGVSPKVRKVLQLLRLRQIFNGTFVKLNK

SEQ ID NO: 28508 - protein, 36 aa, Artificial Sequence
  Quasi-synthetic sequence derived from human genome
FRLIRKMFSFKVSRWMGLACFRSLAASSPSIRQKKL

SEQ ID NO: 28509 - protein, 36 aa, Artificial Sequence
  Quasi-synthetic sequence derived from human genome
ILAKISRPKKRAKTITFSKNAVISKRGGKLCLLIRV

SEQ ID NO: 28510 - protein, 36 aa, Artificial Sequence
  Quasi-synthetic sequence derived from human genome
KKFKLWLLNALEGVPALLQISKLKEVTLFVKRLRRK

SEQ ID NO: 28511 - protein, 36 aa, Artificial Sequence
  Quasi-synthetic sequence derived from human genome
GNYVRLNMKQKHYVRGRALRSRLLRKQAWKQKWRKK

SEQ ID NO: 28512 - protein, 36 aa, Artificial Sequence
  Quasi-synthetic sequence derived from human genome
LSWKRYQPCWVLMVSVLLHHWKALKKVNMKLLVNIR

SEQ ID NO: 28513 - protein, 36 aa, Artificial Sequence
  Quasi-synthetic sequence derived from human genome
FRLSFVYNHYLFFACILVVLLAIFLYLLRLRRIHHR

SEQ ID NO: 28514 - protein, 36 aa, Artificial Sequence
  Quasi-synthetic sequence derived from human genome
KDKPVSFHKKKIFWSHRNSFPHLLYRLLFPRLMLLL

SEQ ID NO: 28515 - protein, 36 aa, Artificial Sequence
  Quasi-synthetic sequence derived from human genome
LRAPALRRLLPPLLLLLLSLPPRARAKYVRGNLSSK

SEQ ID NO: 28516 - protein, 36 aa, Artificial Sequence
  Quasi-synthetic sequence derived from human genome
MRRHASRRGPSRRRLGRLWNRLFHRPRAPRGQIPLL

SEQ ID NO: 28517 - protein, 36 aa, Artificial Sequence
  Quasi-synthetic sequence derived from human genome
VKRHRSSFRNRFPLLKVLILQRNKLSDTPKGLWKLK

SEQ ID NO: 28518 - protein, 36 aa, Artificial Sequence
  Quasi-synthetic sequence derived from human genome
IQAVVAILLCILTITVITLLIFLRRRLRKQARAHGK

SEQ ID NO: 28519 - protein, 36 aa, Artificial Sequence
  Quasi-synthetic sequence derived from human genome
ALLRLFRMLRIFKLGKYWPTFQILMWSLSNSWVALK

SEQ ID NO: 28520 - protein, 36 aa, Artificial Sequence
  Quasi-synthetic sequence derived from human genome
PLTRMPKGMWICQICRPRKKGRKLLQKKAAQIKRRY

SEQ ID NO: 28521 - protein, 36 aa, Artificial Sequence
  Quasi-synthetic sequence derived from human genome
VLPKPRMRGLLARRLRNHMAVAFVLSLGVAALYKFR

SEQ ID NO: 28522 - protein, 36 aa, Artificial Sequence
  Quasi-synthetic sequence derived from human genome
KAFVAGLLLGKGCRYFRYILKQDHQILGKKIKRMKR

SEQ ID NO: 28523 - protein, 36 aa, Artificial Sequence
  Quasi-synthetic sequence derived from human genome
GILKTLLRCRNEKKRHRAVRLIFTIMIVYFLFWAPY

SEQ ID NO: 28524 - protein, 36 aa, Artificial Sequence
  Quasi-synthetic sequence derived from human genome
RRGRLARCWARCRDWRRMALVSALLLMLFCVALWPV

SEQ ID NO: 28525 - protein, 36 aa, Artificial Sequence
  Quasi-synthetic sequence derived from human genome
LYACKKLNKKRLKKRKGYQGAMVEKKILMKVHSRFI

SEQ ID NO: 28526 - protein, 36 aa, Artificial Sequence
  Quasi-synthetic sequence derived from human genome
IRVALAVAVLKTVILGLLCLLLLWWRRRKGSRAPSS

SEQ ID NO: 28527 - protein, 36 aa, Artificial Sequence
  Quasi-synthetic sequence derived from human genome
CYFRIIQTLFSCKNHKKAKAIKLILLVVIVFFLFWT

SEQ ID NO: 28528 - protein, 36 aa, Artificial Sequence
  Quasi-synthetic sequence derived from human genome
FFRLQKFLRRTQFLLFFLTAAYLMTGSLLLLQRVRV

SEQ ID NO: 28529 - protein, 36 aa, Artificial Sequence
  Quasi-synthetic sequence derived from human genome
RGRPRLRLGERGLMEPLLPPKRRLLPRVRLLPLLLA

SEQ ID NO: 28530 - protein, 36 aa, Artificial Sequence
  Quasi-synthetic sequence derived from human genome
LARMRYKRTKAALTIIRYYRRYKVKSYIHEVARRFH

SEQ ID NO: 28531 - protein, 36 aa, Artificial Sequence
  Quasi-synthetic sequence derived from human genome
KVARKFWWKNVKMIVLICVIVFIIILFIVLFATGAF

SEQ ID NO: 28532 - protein, 36 aa, Artificial Sequence
  Quasi-synthetic sequence derived from human genome
FRYLQRLLLVHGRWSYFRMCKFLCYFFYKNFAFTLV

SEQ ID NO: 28533 - protein, 36 aa, Artificial Sequence
  Quasi-synthetic sequence derived from human genome
RGVSFVYNHYLFSGCFLVVLLAILLYLLRLRRIHRR

SEQ ID NO: 28534 - protein, 36 aa, Artificial Sequence
  Quasi-synthetic sequence derived from human genome
ARMWRIRRRYCQVLNAVRIIQAYWRCRSCASRGFIK

SEQ ID NO: 28535 - protein, 36 aa, Artificial Sequence
  Quasi-synthetic sequence derived from human genome
RKQIKRKAPRGFLKRVFKRKKPQLRLEKSGDLLVHL

SEQ ID NO: 28536 - protein, 36 aa, Artificial Sequence
  Quasi-synthetic sequence derived from human genome
LLAILLVVAVFCILWNWNKRKKRQVPYLRVTVMPLL

SEQ ID NO: 28537 - protein, 36 aa, Artificial Sequence
  Quasi-synthetic sequence derived from human genome
LLLLVVCGIGCVWHWKHRVATRFTLPRFLQRRSSRR

SEQ ID NO: 28538 - protein, 36 aa, Artificial Sequence
  Quasi-synthetic sequence derived from human genome
NASLPINPTIIRIMRVLRIARVLKLLKMAVGMRALL

SEQ ID NO: 28539 - protein, 36 aa, Artificial Sequence
  Quasi-synthetic sequence derived from human genome
LKMIPRIDYDRIKARMSLKDWFAKRKKFKRPPQRLF

SEQ ID NO: 28540 - protein, 36 aa, Artificial Sequence
  Quasi-synthetic sequence derived from human genome
KIYIVLRRRRKRVNTKRSSRAFRAHLRAPLKEAARR

SEQ ID NO: 28541 - protein, 36 aa, Artificial Sequence
  Quasi-synthetic sequence derived from human genome
VVSPVSYLLQLKGKKHVLHLWPKRLLLPRHLRVFSF

SEQ ID NO: 28542 - protein, 36 aa, Artificial Sequence
  Quasi-synthetic sequence derived from human genome
LLRLRNKLRGVQRNLAGSLVRLSALVKSKQKAYFIL

SEQ ID NO: 28543 - protein, 36 aa, Artificial Sequence
  Quasi-synthetic sequence derived from human genome
HRFLGRHFPRFYVLYTIFMKGLQMLWADAKKARRIK

SEQ ID NO: 28544 - protein, 36 aa, Artificial Sequence
  Quasi-synthetic sequence derived from human genome
LNLNNEVVKMRKEVKRIRVLVIRKLVRSVGRLKSKK

SEQ ID NO: 28545 - protein, 36 aa, Artificial Sequence
  Quasi-synthetic sequence derived from human genome
VWLRLRKILFCVLGLYIAIPFLIKLCPGIQAKLIFL

SEQ ID NO: 28546 - protein, 36 aa, Artificial Sequence
  Quasi-synthetic sequence derived from human genome
LYCSILFLTCISVHRCLGVLRPLRSLRWGRARYARR

SEQ ID NO: 28547 - protein, 36 aa, Artificial Sequence
  Quasi-synthetic sequence derived from human genome
LLLLRWRRPALHRPIKVNLLIPVAYLVFWAFLLVFS

SEQ ID NO: 28548 - protein, 36 aa, Artificial Sequence
  Quasi-synthetic sequence derived from human genome
KIFRCPSPIYFANIGFFRRKLIDAVGFSPLRILRKR

SEQ ID NO: 28549 - protein, 36 aa, Artificial Sequence
  Quasi-synthetic sequence derived from human genome
LCLLAAGFVVYLKRKTLIRLLFTNKKTTIEKLRCVR

SEQ ID NO: 28550 - protein, 36 aa, Artificial Sequence
  Quasi-synthetic sequence derived from human genome
KKKTFKGLIRIFRKGVIAVLAANRLKILGQSCASLF

SEQ ID NO: 28551 - protein, 36 aa, Artificial Sequence
  Quasi-synthetic sequence derived from human genome
TRAAGVFYPWRFRLLCLLRRWLPRPRAWFIRQELNV

SEQ ID NO: 28552 - protein, 36 aa, Artificial Sequence
  Quasi-synthetic sequence derived from human genome
GKKKMSKLSRSARAGVIFPVGRLMRYLKKGTFKYRI

SEQ ID NO: 28553 - protein, 36 aa, Artificial Sequence
  Quasi-synthetic sequence derived from human genome
FWIVFLLLIVFYTAITKKIFKSHLKSSRNSTSVKKK

SEQ ID NO: 28554 - protein, 36 aa, Artificial Sequence
  Quasi-synthetic sequence derived from human genome
FIAVGILGVVLLAIFVALFFLTKKRRQRQRLAVSSR

SEQ ID NO: 28555 - protein, 36 aa, Artificial Sequence
  Quasi-synthetic sequence derived from human genome
ALASCTRCLNKIMKTRVCRRLRRANRVLRARCRRAV

SEQ ID NO: 28556 - protein, 36 aa, Artificial Sequence
  Quasi-synthetic sequence derived from human genome
LGKKVLNLLKGAFPARLKKVLIVGAPIWFRVPYSII

SEQ ID NO: 28557 - protein, 36 aa, Artificial Sequence
  Quasi-synthetic sequence derived from human genome
MPSPRPVLLRGARAALLLLLPPRLLARPSLLLRRSL

SEQ ID NO: 28558 - protein, 36 aa, Artificial Sequence
  Quasi-synthetic sequence derived from human genome
KRKKRVHFHGFMLDVHKRIHRLKQSLPKRKPGFMAK

SEQ ID NO: 28559 - protein, 36 aa, Artificial Sequence
  Quasi-synthetic sequence derived from human genome
PRMAFFSILTVRSALFALRYNILTLMRMLSLKSLKK

SEQ ID NO: 28560 - protein, 36 aa, Artificial Sequence
  Quasi-synthetic sequence derived from human genome
VAVYRKYICTSFYPWVNILKISFKRKKFFIHQRQKQ

SEQ ID NO: 28561 - protein, 36 aa, Artificial Sequence
  Quasi-synthetic sequence derived from human genome
TFNLPRLCIRKFFPKKKCFVFDRPVHRRKLAQLEKL

SEQ ID NO: 28562 - protein, 36 aa, Artificial Sequence
  Quasi-synthetic sequence derived from human genome
LRLLRIFKITKYWASLRNLVVSLMSSMKSIISLLFL

SEQ ID NO: 28563 - protein, 36 aa, Artificial Sequence
  Quasi-synthetic sequence derived from human genome
WALLCKNCLKKWRMKRQTLLEWLFSFLLVLFLYLFF

SEQ ID NO: 28564 - protein, 36 aa, Artificial Sequence
  Quasi-synthetic sequence derived from human genome
VAKKGSLSVLRSFRLLRVFKLAKSWPTLNTLIKIIG

SEQ ID NO: 28565 - protein, 36 aa, Artificial Sequence
  Quasi-synthetic sequence derived from human genome
LWKVPSFLITQVRRMNEATMLLKKQLPSVRKLLRRK

SEQ ID NO: 28566 - protein, 36 aa, Artificial Sequence
  Quasi-synthetic sequence derived from human genome
LRSLKLLAQFRQIQIIILVLVRALKSMTFLLMLLLI

SEQ ID NO: 28567 - protein, 36 aa, Artificial Sequence
  Quasi-synthetic sequence derived from human genome
FKFNIAVGLILCISLVILTFQWRFYLSFRKLMRWIL

SEQ ID NO: 28568 - protein, 36 aa, Artificial Sequence
  Quasi-synthetic sequence derived from human genome
LLRKLGVKLVQRLGLTFLKPKVAAWRYQRGCRSLAA

SEQ ID NO: 28569 - protein, 36 aa, Artificial Sequence
  Quasi-synthetic sequence derived from human genome
GLSVLGGLFLLFVLENMLGLLRHRGLRPRCCRRKRR

SEQ ID NO: 28570 - protein, 36 aa, Artificial Sequence
  Quasi-synthetic sequence derived from human genome
KNMQFLFVNKRLVLRTKLHKLIDFLLRKESIICKPK

SEQ ID NO: 28571 - protein, 36 aa, Artificial Sequence
  Quasi-synthetic sequence derived from human genome
HFFFHLIIFAFCIAVVYITYHNKRKIFLLVQSRKWR

SEQ ID NO: 28572 - protein, 36 aa, Artificial Sequence
  Quasi-synthetic sequence derived from human genome
ISVMGGLIALLLLLLVFTVALYAQRRWQKRRRIPQK

SEQ ID NO: 28573 - protein, 36 aa, Artificial Sequence
  Quasi-synthetic sequence derived from human genome
LKKKLFLTLKENEKLRKRLQAQRLVMRRMSSRLRAC

SEQ ID NO: 28574 - protein, 36 aa, Artificial Sequence
  Quasi-synthetic sequence derived from human genome
KLCSRFLLKCGFITIPWRCIKKCSPLMPRAAVPRFV

SEQ ID NO: 28575 - protein, 36 aa, Artificial Sequence
  Quasi-synthetic sequence derived from human genome
IRSYILNKDLLRKALILMNSKHTHLILCVLRFMRRM

SEQ ID NO: 28576 - protein, 36 aa, Artificial Sequence
  Quasi-synthetic sequence derived from human genome
CRRIVVSRGRLRRLLWIGFTLTAVALILWQCALLVF

SEQ ID NO: 28577 - protein, 36 aa, Artificial Sequence
  Quasi-synthetic sequence derived from human genome
LLPHLLPALGFKNKTVLKKRCKDCYLVKRRGRWYVY

SEQ ID NO: 28578 - protein, 36 aa, Artificial Sequence
  Quasi-synthetic sequence derived from human genome
LKIKLAVRMDKPQNMKHSGYLWAIGKNVWKRWKKRF

SEQ ID NO: 28579 - protein, 36 aa, Artificial Sequence
  Quasi-synthetic sequence derived from human genome
WLIYKHTKLLKKIDHAKVRKHQRKFLQAIHQLRSVK

SEQ ID NO: 28580 - protein, 36 aa, Artificial Sequence
  Quasi-synthetic sequence derived from human genome
FRIKRFLAKKQKQNRPIPQWIRMKTGNKIRYNSKRR

SEQ ID NO: 28581 - protein, 36 aa, Artificial Sequence
  Quasi-synthetic sequence derived from human genome
LFRSRSKRRHRTVKLIFAIVVAYFLSWGPYNFTLFL

SEQ ID NO: 28582 - protein, 36 aa, Artificial Sequence
  Quasi-synthetic sequence derived from human genome
KFPLPIYKSKKGWTAYKLQLFKMFPIILAILVSWLL

SEQ ID NO: 28583 - protein, 36 aa, Artificial Sequence
  Quasi-synthetic sequence derived from human genome
FYRNKLKYLAFLRKRMNTNPSRGPYHFRAPSRIFWR

SEQ ID NO: 28584 - protein, 36 aa, Artificial Sequence
  Quasi-synthetic sequence derived from human genome
RIGRILRLIKGAKGIRTLLFALMMSLPALFNIGLLL

SEQ ID NO: 28585 - protein, 36 aa, Artificial Sequence
  Quasi-synthetic sequence derived from human genome
RYLRVKLTVRFRIPGLPGCILSFQLKVCFLPVMWLF

SEQ ID NO: 28586 - protein, 36 aa, Artificial Sequence
  Quasi-synthetic sequence derived from human genome
RLWKVLALVFGFATCATLFFILRKQYLQRQERLRLK

SEQ ID NO: 28587 - protein, 36 aa, Artificial Sequence
  Quasi-synthetic sequence derived from human genome
RAVILHFFRGLLYWKNTLALAAILVLLRVRQCLSLR

SEQ ID NO: 28588 - protein, 36 aa, Artificial Sequence
  Quasi-synthetic sequence derived from human genome
RYKIRHTKKKTFKCMKCSKSFFMLSHLIQHKRIHTR

SEQ ID NO: 28589 - protein, 36 aa, Artificial Sequence
  Quasi-synthetic sequence derived from human genome
RSWLTRKHIQRLHAAATVIKRAWQKWRIRMACLAAK

SEQ ID NO: 28590 - protein, 36 aa, Artificial Sequence
  Quasi-synthetic sequence derived from human genome
LRILSKYHRFISFTLYLIGFCMFVLSLVKKHYRLQF

SEQ ID NO: 28591 - protein, 36 aa, Artificial Sequence
  Quasi-synthetic sequence derived from human genome
FRILRIFKLIAPKLLQIIDKRMSHQKTFWYGILKGY

SEQ ID NO: 28592 - protein, 36 aa, Artificial Sequence
  Quasi-synthetic sequence derived from human genome
LKRFLLARRSRRGLFAQIVLPALFVGLALVFSLIVP

SEQ ID NO: 28593 - protein, 36 aa, Artificial Sequence
  Quasi-synthetic sequence derived from human genome
KKPSSVRALSIVLPIVLLVFLCLGVFLLWKNWRLKN

SEQ ID NO: 28594 - protein, 36 aa, Artificial Sequence
  Quasi-synthetic sequence derived from human genome
FKNLFYRTYMLFKNASGKRRFLLCLLLFTVITYFFV

SEQ ID NO: 28595 - protein, 36 aa, Artificial Sequence
  Quasi-synthetic sequence derived from human genome
FLKITSTRLLCSRLCQQLRSKRKFFGTVPISRLHRR

SEQ ID NO: 28596 - protein, 36 aa, Artificial Sequence
  Quasi-synthetic sequence derived from human genome
FRRPKTLRLRRQPKYPRKSAPRRNKLDHYAIIKFPL

SEQ ID NO: 28597 - protein, 36 aa, Artificial Sequence
  Quasi-synthetic sequence derived from human genome
WVILLSAFAGLLLLMLLILALWKIGFFKRPLKKKME

SEQ ID NO: 28598 - protein, 36 aa, Artificial Sequence
  Quasi-synthetic sequence derived from human genome
PHIRLRLSKLRRCVQWLKVMGLFAFVVLCSILFSLY

SEQ ID NO: 28599 - protein, 36 aa, Artificial Sequence
  Quasi-synthetic sequence derived from human genome
FKSGKFIRIFQLSNNIRSVVLRHCKKRQSHLRLTLK

SEQ ID NO: 28600 - protein, 36 aa, Artificial Sequence
  Quasi-synthetic sequence derived from human genome
KGIDSEVYKTARALRIVRFTKILSLLRLLRLSRLIR

SEQ ID NO: 28601 - protein, 36 aa, Artificial Sequence
  Quasi-synthetic sequence derived from human genome
LVLSLSLAGALFLLAGLVAVALVVRKVKLRNLQKKR

SEQ ID NO: 28602 - protein, 36 aa, Artificial Sequence
  Quasi-synthetic sequence derived from human genome
RCCVRALSIQRLWYFWFLLMMGVLFCCGAGFFIRRR

SEQ ID NO: 28603 - protein, 36 aa, Artificial Sequence
  Quasi-synthetic sequence derived from human genome
AFFIRCGIFLILEKLKIITYRNLFKKVYLLLKTHQL

SEQ ID NO: 28604 - protein, 36 aa, Artificial Sequence
  Quasi-synthetic sequence derived from human genome
RPRKPPPRKHTRSWAVLKLLLLLLLFGVAGGLVACR

SEQ ID NO: 28605 - protein, 36 aa, Artificial Sequence
  Quasi-synthetic sequence derived from human genome
RKRIRYRFRRFIQQFSQCKATARNLKLKYLINLETL

SEQ ID NO: 28606 - protein, 36 aa, Artificial Sequence
  Quasi-synthetic sequence derived from human genome
VCPRLWMWSWKHIRKHRQKVKQYKELYKKKLTSKKP

SEQ ID NO: 28607 - protein, 36 aa, Artificial Sequence
  Quasi-synthetic sequence derived from human genome
PWVKVVFLEKLPALLFMQQPRHHCARQRLRLRRRQR

SEQ ID NO: 28608 - protein, 36 aa, Artificial Sequence
  Quasi-synthetic sequence derived from human genome
LKKHTLIRFLPRPIRQQLLYKRRYIFSVVENLQRLC

SEQ ID NO: 28609 - protein, 36 aa, Artificial Sequence
  Quasi-synthetic sequence derived from human genome
HIKLWRRNLWIFVSKFTEFDARKLHKLYKMAHKKRS

SEQ ID NO: 28610 - protein, 36 aa, Artificial Sequence
  Quasi-synthetic sequence derived from human genome
KTKSKYASYLSFIKILLKRGGVRVSTKNLIKLFQII

SEQ ID NO: 28611 - protein, 36 aa, Artificial Sequence
  Quasi-synthetic sequence derived from human genome
VAVLITGYIQICFWVIAAARQIQKMRKFYFRRIMRM

SEQ ID NO: 28612 - protein, 36 aa, Artificial Sequence
  Quasi-synthetic sequence derived from human genome
FIRHWRQWNRIFRWKCHDIVKSKVFYWLVILIVALN

SEQ ID NO: 28613 - protein, 36 aa, Artificial Sequence
  Quasi-synthetic sequence derived from human genome
RKLITKYNRRELTDKLLIFLALALFLATVLYIVKKR

SEQ ID NO: 28614 - protein, 36 aa, Artificial Sequence
  Quasi-synthetic sequence derived from human genome
MVNLAAMVWRRLLRKRWVLALVFGLSLVYFLSSTFK

SEQ ID NO: 28615 - protein, 36 aa, Artificial Sequence
  Quasi-synthetic sequence derived from human genome
AALVLLLLFMMTVFFAKKLYLLKTENTKLRRTNKFR

SEQ ID NO: 28616 - protein, 36 aa, Artificial Sequence
  Quasi-synthetic sequence derived from human genome
YILFRATRKPLSGRTPRLVYKWFLLIYKLSYAFGVV

SEQ ID NO: 28617 - protein, 36 aa, Artificial Sequence
  Quasi-synthetic sequence derived from human genome
FIARKLQKNLKTGSFLNRLGKLLLHLFMVLCLTLFL

SEQ ID NO: 28618 - protein, 36 aa, Artificial Sequence
  Quasi-synthetic sequence derived from human genome
KVVQILRLMRIFRILKLARHSVGLRSLGATLRHSYH

SEQ ID NO: 28619 - protein, 36 aa, Artificial Sequence
  Quasi-synthetic sequence derived from human genome
ALRRFQGLLLDRRGRLHGQVLRLREVARRLERLRRR

SEQ ID NO: 28620 - protein, 36 aa, Artificial Sequence
  Quasi-synthetic sequence derived from human genome
IRFPGRRGYGRLRPRARSLSKASTAINWLTKKFLLK

SEQ ID NO: 28621 - protein, 36 aa, Artificial Sequence
  Quasi-synthetic sequence derived from human genome
LLIVVKVRAAGVRVGCVRRRSERKVTRMVLVVVLVF

SEQ ID NO: 28622 - protein, 36 aa, Artificial Sequence
  Quasi-synthetic sequence derived from human genome
RIGRILRLVRAARGIRTLLFALMMSLPSLFNIGLLL

SEQ ID NO: 28623 - protein, 36 aa, Artificial Sequence
  Quasi-synthetic sequence derived from human genome
WRGRYGRRRPFIWALSLGILLSLFLIPRAGWLAGLL

SEQ ID NO: 28624 - protein, 36 aa, Artificial Sequence
  Quasi-synthetic sequence derived from human genome
FLLSATFNASFLLKLQKWTQKKEKGKKLSRMKLLLK

SEQ ID NO: 28625 - protein, 36 aa, Artificial Sequence
  Quasi-synthetic sequence derived from human genome
KKFYFHQHLCILKAKLGRPVTWNRQLRHFQGRKKAL

SEQ ID NO: 28626 - protein, 36 aa, Artificial Sequence
  Quasi-synthetic sequence derived from human genome
NFNLPRLCIRKFFPKKKCFVFDLPIHRRKLAQLEKL

SEQ ID NO: 28627 - protein, 36 aa, Artificial Sequence
  Quasi-synthetic sequence derived from human genome
KLRLDKLRQSCVMVQKHMRGWLQRKKFLRERRAALI

SEQ ID NO: 28628 - protein, 36 aa, Artificial Sequence
  Quasi-synthetic sequence derived from human genome
LLYKRLIGPKVLAVHVAGLQRKPRPGRVIRDKLRIY

SEQ ID NO: 28629 - protein, 36 aa, Artificial Sequence
  Quasi-synthetic sequence derived from human genome
IAIVSYIPGITIKLLPLRTFRVFRALKAISVVSRLK

SEQ ID NO: 28630 - protein, 36 aa, Artificial Sequence
  Quasi-synthetic sequence derived from human genome
RLLREKEAKIRKALDRLRKKRHLLRRQRTRREFPVI

SEQ ID NO: 28631 - protein, 36 aa, Artificial Sequence
  Quasi-synthetic sequence derived from human genome
RFLNVRASAIIIQRKWRAILPAKIAHEHFLMIKRHR

SEQ ID NO: 28632 - protein, 36 aa, Artificial Sequence
  Quasi-synthetic sequence derived from human genome
LRLLRIFKVTKYWSSLRNLVVSLLNSMKSIISLLFL

SEQ ID NO: 28633 - protein, 36 aa, Artificial Sequence
  Quasi-synthetic sequence derived from human genome
YILITIIIMYFIFTSMAGIRNIGIWFFWIRLYKIRR

SEQ ID NO: 28634 - protein, 36 aa, Artificial Sequence
  Quasi-synthetic sequence derived from human genome
LVLPLLIMVICYSGILKTLLRCRNEKKRHRAVRVIF

SEQ ID NO: 28635 - protein, 36 aa, Artificial Sequence
  Quasi-synthetic sequence derived from human genome
VRTSVSVIIALRRAVKRHRERRERQKRVFRMSLLII

SEQ ID NO: 28636 - protein, 36 aa, Artificial Sequence
  Quasi-synthetic sequence derived from human genome
HMGVLVFQGTTKINTFNWSKVRKLSFKRKRFLIKLH

SEQ ID NO: 28637 - protein, 36 aa, Artificial Sequence
  Quasi-synthetic sequence derived from human genome
AVLLLKKLKAWNDIKKVYASQRMRAGKGKMRNRRRI

SEQ ID NO: 28638 - protein, 36 aa, Artificial Sequence
  Quasi-synthetic sequence derived from human genome
HPTHQRIFGKLVFLPLRLVWKEVILRKILILVLVQK

SEQ ID NO: 28639 - protein, 36 aa, Artificial Sequence
  Quasi-synthetic sequence derived from human genome
RFVVRKTVQRSVAKGSRRCKKRMFKFHQMKHIFEIL

SEQ ID NO: 28640 - protein, 36 aa, Artificial Sequence
  Quasi-synthetic sequence derived from human genome
KRSIKLLSLIKWKGSKSSKLNSKFWKHLVYEMPIKK

SEQ ID NO: 28641 - protein, 36 aa, Artificial Sequence
  Quasi-synthetic sequence derived from human genome
FPVVMYFWKRFCFWKATRSYLQYRGKKFKDRKSPPK

SEQ ID NO: 28642 - protein, 36 aa, Artificial Sequence
  Quasi-synthetic sequence derived from human genome
KPPISRAKMILITKAAIKAIKLYKHVVQIVEKFIKK

SEQ ID NO: 28643 - protein, 36 aa, Artificial Sequence
  Quasi-synthetic sequence derived from human genome
FRDFFFSRGRFSSGFRRTLILSSGFRLVKKKLYSLI

SEQ ID NO: 28644 - protein, 36 aa, Artificial Sequence
  Quasi-synthetic sequence derived from human genome
LRRKLYIHRVTLRKLLPGVQYVYRCGSAQGWSRRFR

SEQ ID NO: 28645 - protein, 36 aa, Artificial Sequence
  Quasi-synthetic sequence derived from human genome
KHLRKSLKIIYLNSIQQLEIRNMSWPRLIRKLRCYL

SEQ ID NO: 28646 - protein, 36 aa, Artificial Sequence
  Quasi-synthetic sequence derived from human genome
LFPFILLGVFGGLWGAFFIRANIAWCRRRKSTKFGK

SEQ ID NO: 28647 - protein, 36 aa, Artificial Sequence
  Quasi-synthetic sequence derived from human genome
ADGGLSVLRTFRLLRVLKLVRFLPALRRQLVVLVKT

SEQ ID NO: 28648 - protein, 36 aa, Artificial Sequence
  Quasi-synthetic sequence derived from human genome
LRAAKWLHFPQLALRRRLGQLSCMSRPALKLRSWPL

SEQ ID NO: 28649 - protein, 36 aa, Artificial Sequence
  Quasi-synthetic sequence derived from human genome
ANASIWWIIRGPVILSILINFILFINILRILMRKLR

SEQ ID NO: 28650 - protein, 36 aa, Artificial Sequence
  Quasi-synthetic sequence derived from human genome
KWKRYGRPYFCMLGAIYLLYIICFTMCCIYRPLKPR

SEQ ID NO: 28651 - protein, 36 aa, Artificial Sequence
  Quasi-synthetic sequence derived from human genome
IFVWFIFISLAQTMKTLRLRKNTVKFSLYRHFKNTL

SEQ ID NO: 28652 - protein, 36 aa, Artificial Sequence
  Quasi-synthetic sequence derived from human genome
LKKNKIHSLPDKVFIKYTKLKKIFLQHNCIRHISRK

SEQ ID NO: 28653 - protein, 36 aa, Artificial Sequence
  Quasi-synthetic sequence derived from human genome
KLRNIRYGFNTILVILIWRIFIARSQMARNIWYFVV

SEQ ID NO: 28654 - protein, 36 aa, Artificial Sequence
  Quasi-synthetic sequence derived from human genome
VLKTLTKPVTLSRSKINKTKVLKMIFVHLIIFCFCF

SEQ ID NO: 28655 - protein, 36 aa, Artificial Sequence
  Quasi-synthetic sequence derived from human genome
LVLRLRGGAKKRKKKSYTTPKKNKHKRKKVKLAVLK

SEQ ID NO: 28656 - protein, 36 aa, Artificial Sequence
  Quasi-synthetic sequence derived from human genome
FLILLGIGIYALWKRSIQSIQKTLLFVITLYKLYKK

SEQ ID NO: 28657 - protein, 36 aa, Artificial Sequence
  Quasi-synthetic sequence derived from human genome
FLSYARTSIRASLTFNRGFKAGRNMRRKLFGVLRLK

SEQ ID NO: 28658 - protein, 36 aa, Artificial Sequence
  Quasi-synthetic sequence derived from human genome
VFFGRVYLGLSIALRFPALVLYIVFIFAMKKKFQGK

SEQ ID NO: 28659 - protein, 36 aa, Artificial Sequence
  Quasi-synthetic sequence derived from human genome
RRKMPSLGWLRKCYQQIDRRLRKNLKSLIIVHPSWF

SEQ ID NO: 28660 - protein, 36 aa, Artificial Sequence
  Quasi-synthetic sequence derived from human genome
WFRGNMQKKCYGKIKASVLLIQAFVRGWKARKNYRK

SEQ ID NO: 28661 - protein, 36 aa, Artificial Sequence
  Quasi-synthetic sequence derived from human genome
KKHLILAFCAGVLLTLLLIAFIFLIIKSYRKYHSKP

SEQ ID NO: 28662 - protein, 36 aa, Artificial Sequence
  Quasi-synthetic sequence derived from human genome
RRPRGSTARTLLRLLLRLLLFLGLLALALHFLGLQP

SEQ ID NO: 28663 - protein, 36 aa, Artificial Sequence
  Quasi-synthetic sequence derived from human genome
VLPMWVLALIVIFLTIAVLLALRFCGIYGYRLRRKW

SEQ ID NO: 28664 - protein, 36 aa, Artificial Sequence
  Quasi-synthetic sequence derived from human genome
MAVYRRRFVQQKRAAITLQHYFRTWQTRKQFLLYRK

SEQ ID NO: 28665 - protein, 36 aa, Artificial Sequence
  Quasi-synthetic sequence derived from human genome
KKCIVLVTELMTSGTLKTYLKRFKVMKIKVLRSWCR

SEQ ID NO: 28666 - protein, 36 aa, Artificial Sequence
  Quasi-synthetic sequence derived from human genome
RGVPPLLKSFLQERLGIHLIRRKIVKPKHHVLMSRK

SEQ ID NO: 28667 - protein, 36 aa, Artificial Sequence
  Quasi-synthetic sequence derived from human genome
RRRQGWLKEIRKLQKSTHLLIRKLPFSRLAREICVK

SEQ ID NO: 28668 - protein, 36 aa, Artificial Sequence
  Quasi-synthetic sequence derived from human genome
KTVRFQTPGRFSWFCKRRRAFWHTPRLPTLPKRVPR

SEQ ID NO: 28669 - protein, 36 aa, Artificial Sequence
  Quasi-synthetic sequence derived from human genome
LLLSIVILYCRIYSLVRTRSRRLTFRKNISKASRSS

SEQ ID NO: 28670 - protein, 36 aa, Artificial Sequence
  Quasi-synthetic sequence derived from human genome
MAKFRRRTCIILALFILFIFSLMMGLKMLRPNTATF

SEQ ID NO: 28671 - protein, 36 aa, Artificial Sequence
  Quasi-synthetic sequence derived from human genome
SAALPINPTIIRIMRVLRIARVLKLLKMATGMRALL

SEQ ID NO: 28672 - protein, 36 aa, Artificial Sequence
  Quasi-synthetic sequence derived from human genome
KLSKRQLFFRKKLLHSSQMLRAVSLGQDRYRRRYWV

SEQ ID NO: 28673 - protein, 36 aa, Artificial Sequence
  Quasi-synthetic sequence derived from human genome
QAYWKGFQTRKRLKKLPSAVIALQRSFRSKRSKMLL

SEQ ID NO: 28674 - protein, 36 aa, Artificial Sequence
  Quasi-synthetic sequence derived from human genome
RVSKKNIFLLFKKLCSFRYRRDLLRLSYGEAKKAAR

SEQ ID NO: 28675 - protein, 36 aa, Artificial Sequence
  Quasi-synthetic sequence derived from human genome
GTYTFLTCFAGFWLIWGLIVLLCCFCSFLRRRLKRR

SEQ ID NO: 28676 - protein, 36 aa, Artificial Sequence
  Quasi-synthetic sequence derived from human genome
WVRMWCVRQRYCRLLNAVRIIQVYWRWHSCHSRVFI

SEQ ID NO: 28677 - protein, 36 aa, Artificial Sequence
  Quasi-synthetic sequence derived from human genome
FVLLIFIVSMIYLACKKPKKPQRRQNNRLKPLTLAY

SEQ ID NO: 28678 - protein, 36 aa, Artificial Sequence
  Quasi-synthetic sequence derived from human genome
WFHVLFYLAVGIMFLVNTVLWVTIRKELKRKKKWNL

SEQ ID NO: 28679 - protein, 36 aa, Artificial Sequence
  Quasi-synthetic sequence derived from human genome
RTLTQKRYLVKFICLSIWGLSLLLALPVLLFRRTVY

SEQ ID NO: 28680 - protein, 36 aa, Artificial Sequence
  Quasi-synthetic sequence derived from human genome
QRGRLLRRTLIRYANLASVLVLRSVSTRVLKRFPTM

SEQ ID NO: 28681 - protein, 36 aa, Artificial Sequence
  Quasi-synthetic sequence derived from human genome
KPGQLINWFICSLCVPRVRKLWSSRRPRTRRNLLLG

SEQ ID NO: 28682 - protein, 36 aa, Artificial Sequence
  Quasi-synthetic sequence derived from human genome
FHLLVQKSKKSSTFKFYRRHKMPAPAQRKLLPRRHL

SEQ ID NO: 28683 - protein, 36 aa, Artificial Sequence
  Quasi-synthetic sequence derived from human genome
QKLLKKIGISWNKKYRKQHGPLRKFLQLHSQIFLLS

SEQ ID NO: 28684 - protein, 36 aa, Artificial Sequence
  Quasi-synthetic sequence derived from human genome
RRPRPRRELSLGRKKAPHRLCGRFSRISMKLPRIPL

SEQ ID NO: 28685 - protein, 36 aa, Artificial Sequence
  Quasi-synthetic sequence derived from human genome
FGLEIRMRRIVFAGVILFRLLGVILFRLLGVILFGR

SEQ ID NO: 28686 - protein, 36 aa, Artificial Sequence
  Quasi-synthetic sequence derived from human genome
AKKKRKKGLRIKGKRRRKKLILAKKFSKDLGSGRPV

SEQ ID NO: 28687 - protein, 36 aa, Artificial Sequence
  Quasi-synthetic sequence derived from human genome
LLLVLQYFGPLCFIFICYFKIYIRLKRRNNMMDKMR

SEQ ID NO: 28688 - protein, 36 aa, Artificial Sequence
  Quasi-synthetic sequence derived from human genome
RWLWRHVDLTLYTMRPKVMWHLLRRYMASRLHSLRM

SEQ ID NO: 28689 - protein, 36 aa, Artificial Sequence
  Quasi-synthetic sequence derived from human genome
RMWGRLVGLVYILPAAYFWRKGWLSRGMKGRVLALC

SEQ ID NO: 28690 - protein, 36 aa, Artificial Sequence
  Quasi-synthetic sequence derived from human genome
KKGVYLSHTGGKMLFWVLGLLILCGFLWTRKGKLKI

SEQ ID NO: 28691 - protein, 36 aa, Artificial Sequence
  Quasi-synthetic sequence derived from human genome
RVTNIFPKQKYLSKKTTKRKRGYIKNKLVFKKGKKI

SEQ ID NO: 28692 - protein, 36 aa, Artificial Sequence
  Quasi-synthetic sequence derived from human genome
RRLLILILKIGRRWTELIRTMESRVLLRTFCLIFGL

SEQ ID NO: 28693 - protein, 36 aa, Artificial Sequence
  Quasi-synthetic sequence derived from human genome
RIFIQAKRVKTKHLCYCLYRPRKYLYVTSSFKGAFK

SEQ ID NO: 28694 - protein, 36 aa, Artificial Sequence
  Quasi-synthetic sequence derived from human genome
HILFSLYTRTLYLRYRPKVKFLFGIWPVILFEPLRK

SEQ ID NO: 28695 - protein, 36 aa, Artificial Sequence
  Quasi-synthetic sequence derived from human genome
AWVYRHQARHKAVVLRCHAVLLARAHKARALARLLR

SEQ ID NO: 28696 - protein, 36 aa, Artificial Sequence
  Quasi-synthetic sequence derived from human genome
LQWRRRHCCFAKMTWNAKRSLFRTHLIGVLSLVFLF

SEQ ID NO: 28697 - protein, 36 aa, Artificial Sequence
  Quasi-synthetic sequence derived from human genome
RRWMIRKRMREMHRAATFIQSTFRMHRLHMRYQALK

SEQ ID NO: 28698 - protein, 36 aa, Artificial Sequence
  Quasi-synthetic sequence derived from human genome
RILFLKPSCMLEVITWPIQAFVKRKVIIFLKKCLLC

SEQ ID NO: 28699 - protein, 36 aa, Artificial Sequence
  Quasi-synthetic sequence derived from human genome
LIRKKFRMMKIPKPILFGLNIAMKKQTKISGKMQDF

SEQ ID NO: 28700 - protein, 36 aa, Artificial Sequence
  Quasi-synthetic sequence derived from human genome
LRGYRYRKEFLRQRRAAVTLQAWWRGYCNRRNFKLI

SEQ ID NO: 28701 - protein, 36 aa, Artificial Sequence
  Quasi-synthetic sequence derived from human genome
MRRAKRIRNAALQHLFIRKSFRPFKCLQCGKAFREK

SEQ ID NO: 28702 - protein, 36 aa, Artificial Sequence
  Quasi-synthetic sequence derived from human genome
KRYVAYFAQVKHLYNWNLPPRRILFIKHFIIYSIPR

SEQ ID NO: 28703 - protein, 36 aa, Artificial Sequence
  Quasi-synthetic sequence derived from human genome
LYRKPRPKAAVYLNLSLPLKSVHRLSLKKSFGFGKR

SEQ ID NO: 28704 - protein, 36 aa, Artificial Sequence
  Quasi-synthetic sequence derived from human genome
LMIRRLRGVRLLSGSREKDRNLRRITRLVLVVVAVF

SEQ ID NO: 28705 - protein, 36 aa, Artificial Sequence
  Quasi-synthetic sequence derived from human genome
GLLLLGLIILLLWKCDFFKRTRYYQIMPKYHAVRIR

SEQ ID NO: 28706 - protein, 36 aa, Artificial Sequence
  Quasi-synthetic sequence derived from human genome
KRAFVRILGCQCRGRGRRRRRRRRRLGGCAYTYRPW

SEQ ID NO: 28707 - protein, 36 aa, Artificial Sequence
  Quasi-synthetic sequence derived from human genome
LKLHRVLKVFLSRTAQRIPYMTGGRVMRMLAVILLV

SEQ ID NO: 28708 - protein, 36 aa, Artificial Sequence
  Quasi-synthetic sequence derived from human genome
FAITRFKHLKKLLLVHGHWCYSRLARMVVYYLYKNV

SEQ ID NO: 28709 - protein, 36 aa, Artificial Sequence
  Quasi-synthetic sequence derived from human genome
KLHAALYERKLLSLEVRKRRRRSSRLRAMRPKYPVI

SEQ ID NO: 28710 - protein, 36 aa, Artificial Sequence
  Quasi-synthetic sequence derived from human genome
PVSWRTRMRAFHLSLPGGAQLLTYLVKVLKRRTWRR

SEQ ID NO: 28711 - protein, 36 aa, Artificial Sequence
  Quasi-synthetic sequence derived from human genome
YISVKVMLKSIKTRLGRRVPAAPPALRRNLLLQAWK

SEQ ID NO: 28712 - protein, 36 aa, Artificial Sequence
  Quasi-synthetic sequence derived from human genome
TRYKWLIIKIVLALLGLLMLGLFLYSLPGYMVKKLL

SEQ ID NO: 28713 - protein, 36 aa, Artificial Sequence
  Quasi-synthetic sequence derived from human genome
WRAGWIGYLELRRYTYLAKAVLRRIVSKIFRNRQCW

SEQ ID NO: 28714 - protein, 36 aa, Artificial Sequence
  Quasi-synthetic sequence derived from human genome
FFHVKVLNINLKRKFIKKRIIIISNYSKRNSLLEVN

SEQ ID NO: 28715 - protein, 36 aa, Artificial Sequence
  Quasi-synthetic sequence derived from human genome
QVKRKFKHFQEFHRELLKYKAFIRIPIPTRRHTFRR

SEQ ID NO: 28716 - protein, 36 aa, Artificial Sequence
  Quasi-synthetic sequence derived from human genome
RIAFWLQWFNSFVNPLLYPLCHKRFQKAFLKIFCIK

SEQ ID NO: 28717 - protein, 36 aa, Artificial Sequence
  Quasi-synthetic sequence derived from human genome
KKRVRFTKRKQKVPGFPKRFTVKPVVLGFPYFHSGR

SEQ ID NO: 28718 - protein, 36 aa, Artificial Sequence
  Quasi-synthetic sequence derived from human genome
FRQRIILRVWWSTWRQRLGQVRVSRALHASALKHRA

SEQ ID NO: 28719 - protein, 36 aa, Artificial Sequence
  Quasi-synthetic sequence derived from human genome
NFSNLIFLRIKRRVKSVVLVILLGPLLFLVCHLFVI

SEQ ID NO: 28720 - protein, 36 aa, Artificial Sequence
  Quasi-synthetic sequence derived from human genome
IWIHCFTVYLVPCSIFFILNSIIVYKLRRKSNFRLR

SEQ ID NO: 28721 - protein, 36 aa, Artificial Sequence
  Quasi-synthetic sequence derived from human genome
SKLRGLKRKWIRCSAQATVLHLKKFIAKKLNLSSFN

SEQ ID NO: 28722 - protein, 36 aa, Artificial Sequence
  Quasi-synthetic sequence derived from human genome
LVLKLPWTQVGFSLLFLYLGSGGWRFIRVFIKTIRR

SEQ ID NO: 28723 - protein, 36 aa, Artificial Sequence
  Quasi-synthetic sequence derived from human genome
KGMDSEVYKTARALRIVRFTKILSLLRLLRLSRLIR

SEQ ID NO: 28724 - protein, 36 aa, Artificial Sequence
  Quasi-synthetic sequence derived from human genome
YSSVVSFYLPFGVTVLVYARIYVVLKQRRRKRILTR

SEQ ID NO: 28725 - protein, 36 aa, Artificial Sequence
  Quasi-synthetic sequence derived from human genome
RRLRKNLKSFIIVHPSWFIRTILAVTRPFISSKFSS

SEQ ID NO: 28726 - protein, 36 aa, Artificial Sequence
  Quasi-synthetic sequence derived from human genome
FKCLYYLIWKNYKKYIIIAFILIILIIFLVLFIYTL

SEQ ID NO: 28727 - protein, 36 aa, Artificial Sequence
  Quasi-synthetic sequence derived from human genome
KFKHLKKLLLAHGHLYYVRIAHLVQYFFYKNLCFIL

SEQ ID NO: 28728 - protein, 36 aa, Artificial Sequence
  Quasi-synthetic sequence derived from human genome
ASMRKLVIVRAGCPIRLFAIVRGRPAPKVTWRKVGI

SEQ ID NO: 28729 - protein, 36 aa, Artificial Sequence
  Quasi-synthetic sequence derived from human genome
LLMVLRCLRPLRIFKLVPQMRKVVRELFSGFKEIFL

SEQ ID NO: 28730 - protein, 36 aa, Artificial Sequence
  Quasi-synthetic sequence derived from human genome
RKLDRLAYIAHPKLGKRARARIAKGLRLCRPKAKAK

SEQ ID NO: 28731 - protein, 36 aa, Artificial Sequence
  Quasi-synthetic sequence derived from human genome
YKTIVKKILAKLKRARSKKLDNFQSEKKVFKKSFLR

SEQ ID NO: 28732 - protein, 36 aa, Artificial Sequence
  Quasi-synthetic sequence derived from human genome
RSHVQWLRHRATQSGQRRWRHALHRRLLNRRLLLAV

SEQ ID NO: 28733 - protein, 36 aa, Artificial Sequence
  Quasi-synthetic sequence derived from human genome
LRVIRLVRVFRIFKLSRHSKGLQILGQTLKASMREL

SEQ ID NO: 28734 - protein, 36 aa, Artificial Sequence
  Quasi-synthetic sequence derived from human genome
KFKKFDHRYLRKILIRKNLPKSSIVSLYKKLEMKQA

SEQ ID NO: 28735 - protein, 36 aa, Artificial Sequence
  Quasi-synthetic sequence derived from human genome
WRVCQKSHCFRLGRQLSKALQVNCVVRKLLVQLRRL

SEQ ID NO: 28736 - protein, 36 aa, Artificial Sequence
  Quasi-synthetic sequence derived from human genome
VLKVVAKVIRALLRILCCLLKAICRVLSIPVRVLVD

SEQ ID NO: 28737 - protein, 36 aa, Artificial Sequence
  Quasi-synthetic sequence derived from human genome
ALRRALRHDLGGKRLSKIATLRRAIHRIAALSLVLR

SEQ ID NO: 28738 - protein, 36 aa, Artificial Sequence
  Quasi-synthetic sequence derived from human genome
LRKYWVRFLLARHSGCRACVLGKDFRFLGKCPKKLS

SEQ ID NO: 28739 - protein, 36 aa, Artificial Sequence
  Quasi-synthetic sequence derived from human genome
IQTRRQRKLHFVVGGFAYLLPKTAVVLRCPARRVRK

SEQ ID NO: 28740 - protein, 36 aa, Artificial Sequence
  Quasi-synthetic sequence derived from human genome
KRKHFRLVLRLVLRGGRELGTFHSRLIKVISKPSQK

SEQ ID NO: 28741 - protein, 36 aa, Artificial Sequence
  Quasi-synthetic sequence derived from human genome
WKLFLRFQQNLLGFLLPLLAMIFFYSRIGCVLVRLR

SEQ ID NO: 28742 - protein, 36 aa, Artificial Sequence
  Quasi-synthetic sequence derived from human genome
RLRKNLKSLIIVHPSWFIRTLLAVTRPFISSKFSQK

SEQ ID NO: 28743 - protein, 36 aa, Artificial Sequence
  Quasi-synthetic sequence derived from human genome
RRGPFPLALLLLFLLGPRLVLAISFHLPINSRKCLR

SEQ ID NO: 28744 - protein, 36 aa, Artificial Sequence
  Quasi-synthetic sequence derived from human genome
RLRTVLKNLSLLKLLKSSNRRIQELHKLAKRCWHSL

SEQ ID NO: 28745 - protein, 36 aa, Artificial Sequence
  Quasi-synthetic sequence derived from human genome
KMRAVALRAGWQQRRRSEKKITRLVLMVVVVFVLCW

SEQ ID NO: 28746 - protein, 36 aa, Artificial Sequence
  Quasi-synthetic sequence derived from human genome
RSKKAVWHKLLSKQRKRAVVACFRMAPLYNLPRHRA

SEQ ID NO: 28747 - protein, 36 aa, Artificial Sequence
  Quasi-synthetic sequence derived from human genome
LLKRRPYGRNKPLISRTMMKNILGHAFYQLIVIFIL

SEQ ID NO: 28748 - protein, 36 aa, Artificial Sequence
  Quasi-synthetic sequence derived from human genome
ISVLVPGLLLVFVTSAFTVVGMLVFILRNRKRSKRR

SEQ ID NO: 28749 - protein, 36 aa, Artificial Sequence
  Quasi-synthetic sequence derived from human genome
FYTSHNLVKNLALFLKIPSDKIRISKIRGKSLRRKR

SEQ ID NO: 28750 - protein, 36 aa, Artificial Sequence
  Quasi-synthetic sequence derived from human genome
KVVPMNCWGVYQAVRWLRWKASLIKLRALRRPGGVL

SEQ ID NO: 28751 - protein, 36 aa, Artificial Sequence
  Quasi-synthetic sequence derived from human genome
LWLRAKFQRLLFKLGCYIQKNCGKFLVVGLLIFGAF

SEQ ID NO: 28752 - protein, 36 aa, Artificial Sequence
  Quasi-synthetic sequence derived from human genome
SINPILYNLISKKYRAAAFKLLLARKSRPRGFHRSR

SEQ ID NO: 28753 - protein, 36 aa, Artificial Sequence
  Quasi-synthetic sequence derived from human genome
VRVLLRFQRKLSVLLLLLGRRRVDFRLVNELLVYGI

SEQ ID NO: 28754 - protein, 36 aa, Artificial Sequence
  Quasi-synthetic sequence derived from human genome
PHLPGKKKIRWDPVRRRFIQSCPIIRIPNRFLRGHR

SEQ ID NO: 28755 - protein, 36 aa, Artificial Sequence
  Quasi-synthetic sequence derived from human genome
KRVVHLQLLRRHTLRAAERNVRRKKVSFQLERIIKK

SEQ ID NO: 28756 - protein, 36 aa, Artificial Sequence
  Quasi-synthetic sequence derived from human genome
KRKNSVKVMYKCLWPNCGKVLRSIVGIKRHVKALHL

SEQ ID NO: 28757 - protein, 36 aa, Artificial Sequence
  Quasi-synthetic sequence derived from human genome
TNGNKKIWWIIRGPMMLCVTVNFFIFLKILKLLISK

SEQ ID NO: 28758 - protein, 36 aa, Artificial Sequence
  Quasi-synthetic sequence derived from human genome
RLLFRIGYSLYTRTWLGYLFYRQQLRRARNRYPKGH

SEQ ID NO: 28759 - protein, 36 aa, Artificial Sequence
  Quasi-synthetic sequence derived from human genome
MKMRRYKLFLMFCMAGLCLISFLHFFKTLSYVTFPR

SEQ ID NO: 28760 - protein, 36 aa, Artificial Sequence
  Quasi-synthetic sequence derived from human genome
RIARILAGSKKKICTKKPRFMSACAQLVIAFILICI

SEQ ID NO: 28761 - protein, 36 aa, Artificial Sequence
  Quasi-synthetic sequence derived from human genome
RHKLLKLSVLLPLIFTILLLLLVAASLLAWRMMKYQ

SEQ ID NO: 28762 - protein, 36 aa, Artificial Sequence
  Quasi-synthetic sequence derived from human genome
LWLVLVAVGAGLLLLGLIILLLWKCGFFKRARTRAL

SEQ ID NO: 28763 - protein, 36 aa, Artificial Sequence
  Quasi-synthetic sequence derived from human genome
RRTLLQAALRAWVIQCWWRSMQAKMLEQRRRLALRL

SEQ ID NO: 28764 - protein, 36 aa, Artificial Sequence
  Quasi-synthetic sequence derived from human genome
LYVLKLLKLQTKYLGRQWRKSNMKTMSAIYQKVRHR

SEQ ID NO: 28765 - protein, 36 aa, Artificial Sequence
  Quasi-synthetic sequence derived from human genome
GWLLLRKAPGGFMGPRWRRRWFVLKGHTLYWYRQPQ

SEQ ID NO: 28766 - protein, 36 aa, Artificial Sequence
  Quasi-synthetic sequence derived from human genome
RGYLVRSLYQLIRMATITMQAYSRGFLARRRYRKML

SEQ ID NO: 28767 - protein, 36 aa, Artificial Sequence
  Quasi-synthetic sequence derived from human genome
NLVQRRKKRLRHRVPPRKPEPLVKLHRTALHWACLK

SEQ ID NO: 28768 - protein, 36 aa, Artificial Sequence
  Quasi-synthetic sequence derived from human genome
HLIKATVIPNRVKMLPYFGIIRNRMMSTHKSKKKIR

SEQ ID NO: 28769 - protein, 36 aa, Artificial Sequence
  Quasi-synthetic sequence derived from human genome
FHRLKIKQILPTIYKRKNLSLFLSISLLIFWGSSLL

SEQ ID NO: 28770 - protein, 36 aa, Artificial Sequence
  Quasi-synthetic sequence derived from human genome
RPLSSFVRKARHRRPLSSFVRKARHRRTLFASPLAK

SEQ ID NO: 28771 - protein, 36 aa, Artificial Sequence
  Quasi-synthetic sequence derived from human genome
LKKGKRENIVNIRKQREKAAILIQAVWKGFILRKKL

SEQ ID NO: 28772 - protein, 36 aa, Artificial Sequence
  Quasi-synthetic sequence derived from human genome
GELLPLRMPLSRWQRRLRRAARRQVLSGHLPFCRFR

SEQ ID NO: 28773 - protein, 36 aa, Artificial Sequence
  Quasi-synthetic sequence derived from human genome
LPFGRTAKPAHIAKVKMKFRFLGKLMAKAIMDFRLV

SEQ ID NO: 28774 - protein, 36 aa, Artificial Sequence
  Quasi-synthetic sequence derived from human genome
MMKKLFLQLIAEFKRLGSSVIYANFNRIILCTKKRR

SEQ ID NO: 28775 - protein, 36 aa, Artificial Sequence
  Quasi-synthetic sequence derived from human genome
FIYQLCNNRKSFRLRRRDLLLGFNKRAIDKCWKIRH

SEQ ID NO: 28776 - protein, 36 aa, Artificial Sequence
  Quasi-synthetic sequence derived from human genome
RKARKYEIPHFRLKKVENIKIWLSLRSYLKRRGPQR

SEQ ID NO: 28777 - protein, 36 aa, Artificial Sequence
  Quasi-synthetic sequence derived from human genome
IRRKNCPACRLRKCCQAGMVLGGRKFKKFNKVRVVR

SEQ ID NO: 28778 - protein, 36 aa, Artificial Sequence
  Quasi-synthetic sequence derived from human genome
YHTIFLLTILAALALLVLILLCLLIYYCRRRCLKPR

SEQ ID NO: 28779 - protein, 36 aa, Artificial Sequence
  Quasi-synthetic sequence derived from human genome
KLMFAGLFFLFFVRFGIGRQLLIKFPWFFSFGYFSK

SEQ ID NO: 28780 - protein, 36 aa, Artificial Sequence
  Quasi-synthetic sequence derived from human genome
ILGFLVPLTIICLCYLFIIIKVKSSGIRVGSSKRKK

SEQ ID NO: 28781 - protein, 36 aa, Artificial Sequence
  Quasi-synthetic sequence derived from human genome
AGVRGYLARRRIRLWHRGAMVIQATWRGYRVRRNLA

SEQ ID NO: 28782 - protein, 36 aa, Artificial Sequence
  Quasi-synthetic sequence derived from human genome
RKAFAKKQQQLSALKVLQRNCAAYLKLRHWQWWRVF

SEQ ID NO: 28783 - protein, 36 aa, Artificial Sequence
  Quasi-synthetic sequence derived from human genome
RLPREKPLPRPRPLTRWQQFARLKGIRPKKKTNLVW

SEQ ID NO: 28784 - protein, 36 aa, Artificial Sequence
  Quasi-synthetic sequence derived from human genome
ILKGKKCIVLVTELMTSGTLKTYLKRFKVMKPKVLR

SEQ ID NO: 28785 - protein, 36 aa, Artificial Sequence
  Quasi-synthetic sequence derived from human genome
TKILGMLRVLRLLRTLRPLRVISRAQGLKLVVETLM

SEQ ID NO: 28786 - protein, 36 aa, Artificial Sequence
  Quasi-synthetic sequence derived from human genome
PIRHSRKMRKLMLDLNKAKSMGQRLSLISKFRFNFL

SEQ ID NO: 28787 - protein, 36 aa, Artificial Sequence
  Quasi-synthetic sequence derived from human genome
LTVIAGLVVIFMMLGGTFLYWRGRRIQNKRAMRRYL

SEQ ID NO: 28788 - protein, 36 aa, Artificial Sequence
  Quasi-synthetic sequence derived from human genome
KIVILGLVLPLLVMVICYSGILKTLLRCRNEKKRHR

SEQ ID NO: 28789 - protein, 36 aa, Artificial Sequence
  Quasi-synthetic sequence derived from human genome
RTSIRASLTFNRGFKAGRNMRRKLFGVLRLKCHSLF

SEQ ID NO: 28790 - protein, 36 aa, Artificial Sequence
  Quasi-synthetic sequence derived from human genome
LFPEFRPGKVLRFLHLFGPGKNVPSVWRSARRKRKK

SEQ ID NO: 28791 - protein, 36 aa, Artificial Sequence
  Quasi-synthetic sequence derived from human genome
FVKVVKNKAYFKRYQVKFRRRREGKTDYYARKRLVI

SEQ ID NO: 28792 - protein, 36 aa, Artificial Sequence
  Quasi-synthetic sequence derived from human genome
KFLQRLLLVHGRWSYLRMCKFLCYFFYKNFAFTMVH

SEQ ID NO: 28793 - protein, 36 aa, Artificial Sequence
  Quasi-synthetic sequence derived from human genome
KIYRGWKCRTHFLLMKKSQIVIAAWYRRYAQQKRYQ

SEQ ID NO: 28794 - protein, 36 aa, Artificial Sequence
  Quasi-synthetic sequence derived from human genome
WKLFQALKLNLFGLVLPLLVMIICYTGIIKILLRRP

SEQ ID NO: 28795 - protein, 36 aa, Artificial Sequence
  Quasi-synthetic sequence derived from human genome
YRRRCCRLCIWLLQTLVHLLQLGQVWRYLRALYLGL

SEQ ID NO: 28796 - protein, 36 aa, Artificial Sequence
  Quasi-synthetic sequence derived from human genome
WALWPRWLADKMLPLLGAVLLQKREKRGPLWRHWRR

SEQ ID NO: 28797 - protein, 36 aa, Artificial Sequence
  Quasi-synthetic sequence derived from human genome
PRKRYRRKLKKYGKNVGKVIIKGCRYVVIGLQGFAA

SEQ ID NO: 28798 - protein, 36 aa, Artificial Sequence
  Quasi-synthetic sequence derived from human genome
LWHTYRWLLLKLLLLLLLLLLLALFLYSVPGYLVKK

SEQ ID NO: 28799 - protein, 36 aa, Artificial Sequence
  Quasi-synthetic sequence derived from human genome
QRREALFCIQYNVRAFMNVKHWPWMKLFFKIKPLLK

SEQ ID NO: 28800 - protein, 36 aa, Artificial Sequence
  Quasi-synthetic sequence derived from human genome
AHPFLLLILLCMSLLLFQVIRLYQRRRWTIRAMHLF

SEQ ID NO: 28801 - protein, 36 aa, Artificial Sequence
  Quasi-synthetic sequence derived from human genome
HTITLQPSSFRNLRLPKRLRVVYFLARTRLAQRLIM

SEQ ID NO: 28802 - protein, 36 aa, Artificial Sequence
  Quasi-synthetic sequence derived from human genome
KRKQLLKPVFLNSWIDLRATYKLFYRRKPKGLSGAL

SEQ ID NO: 28803 - protein, 36 aa, Artificial Sequence
  Quasi-synthetic sequence derived from human genome
SLVALLVAFVLFLRLRSIRCLRNIIHWNLISAFILR

SEQ ID NO: 28804 - protein, 36 aa, Artificial Sequence
  Quasi-synthetic sequence derived from human genome
IIRFLPLFKIIVPILIRIADVQIKKRLSLMYSITKG

SEQ ID NO: 28805 - protein, 36 aa, Artificial Sequence
  Quasi-synthetic sequence derived from human genome
RTHHTGLLSVLAMFFLLVLILSSVFLFRLFKRRQGR

SEQ ID NO: 28806 - protein, 36 aa, Artificial Sequence
  Quasi-synthetic sequence derived from human genome
RWLNKLMKLLQRLPNSVVRRLHRERYKKPSWLTPVP

SEQ ID NO: 28807 - protein, 36 aa, Artificial Sequence
  Quasi-synthetic sequence derived from human genome
LIYKDRLRINRFAWPKILKISYKRSNFYIKVRPAEL

SEQ ID NO: 28808 - protein, 36 aa, Artificial Sequence
  Quasi-synthetic sequence derived from human genome
HKRAIRIILSFFFLFLLYFLAFLIASFGNFLPKTKM

SEQ ID NO: 28809 - protein, 36 aa, Artificial Sequence
  Quasi-synthetic sequence derived from human genome
FVFFRKLTTIFPLNWKYRKALSLGCQRVTLHKNMFL

SEQ ID NO: 28810 - protein, 36 aa, Artificial Sequence
  Quasi-synthetic sequence derived from human genome
VWKNWLGVKRQPLWTLVLILWPVIIFIILAITRTKF

SEQ ID NO: 28811 - protein, 36 aa, Artificial Sequence
  Quasi-synthetic sequence derived from human genome
RIKIFFALAPVFSTKYLKSPLIRMTYKWKSIVMAFS

SEQ ID NO: 28812 - protein, 36 aa, Artificial Sequence
  Quasi-synthetic sequence derived from human genome
RHFPRFYVLYTIFMKGLQMLWADAKKARRIKTNMWK

SEQ ID NO: 28813 - protein, 36 aa, Artificial Sequence
  Quasi-synthetic sequence derived from human genome
RALGGRAVRSRRAIAVLSRWPAFPAFRAFLTFLYRY

SEQ ID NO: 28814 - protein, 36 aa, Artificial Sequence
  Quasi-synthetic sequence derived from human genome
RLNIRKVIPYIASQFRKDKIWLRRTKPSKRQYQICL

SEQ ID NO: 28815 - protein, 36 aa, Artificial Sequence
  Quasi-synthetic sequence derived from human genome
RRTLLRHILVSDRYRFLYCYVPKVACSNWKRVMKVL

SEQ ID NO: 28816 - protein, 36 aa, Artificial Sequence
  Quasi-synthetic sequence derived from human genome
LLVIMVGKQVINNMQEVLIPKLKGWWQKFRLRSKKR

SEQ ID NO: 28817 - protein, 36 aa, Artificial Sequence
  Quasi-synthetic sequence derived from human genome
YVCIREKILLYKTHWMTPIFLKVVINTRRIKHHFKI

SEQ ID NO: 28818 - protein, 36 aa, Artificial Sequence
  Quasi-synthetic sequence derived from human genome
KTFMVLNRKRTIYRFSAKHALFIFGPFNSIRSLAIR

SEQ ID NO: 28819 - protein, 36 aa, Artificial Sequence
  Quasi-synthetic sequence derived from human genome
SQFCWRNLFSCINLLRLLNKLTKWKHSRTMMLVVFK

SEQ ID NO: 28820 - protein, 36 aa, Artificial Sequence
  Quasi-synthetic sequence derived from human genome
RKAFAKRQQQLTAMKVLQRNCAAYLKLRNWQWWRLF

SEQ ID NO: 28821 - protein, 36 aa, Artificial Sequence
  Quasi-synthetic sequence derived from human genome
QRKLKHRLRLDSYLLKPVQRITKYQLLLKELLKYSK

SEQ ID NO: 28822 - protein, 36 aa, Artificial Sequence
  Quasi-synthetic sequence derived from human genome
LIITACYLTIVCKLQRNRLAKTKKPFKIIVTIIITF

SEQ ID NO: 28823 - protein, 36 aa, Artificial Sequence
  Quasi-synthetic sequence derived from human genome
ANSCLNPLVYALASRHFRARFRRLWPCGRRRRHRAR

SEQ ID NO: 28824 - protein, 36 aa, Artificial Sequence
  Quasi-synthetic sequence derived from human genome
RKERIEGLRKRRRLLSIIVVLVVTFALCWMPYHLVK

SEQ ID NO: 28825 - protein, 36 aa, Artificial Sequence
  Quasi-synthetic sequence derived from human genome
RKKAKPRIFFLFNDILVYGSIVLNKRKYRSQHIIPL

SEQ ID NO: 28826 - protein, 36 aa, Artificial Sequence
  Quasi-synthetic sequence derived from human genome
KFHKKVGKLGVLDKKTIKTINKMKTLKRKNILNQIL

SEQ ID NO: 28827 - protein, 36 aa, Artificial Sequence
  Quasi-synthetic sequence derived from human genome
RSFFIRMKSTLTKRGVHIKSSGYKVIHITGRLRLRV

SEQ ID NO: 28828 - protein, 36 aa, Artificial Sequence
  Quasi-synthetic sequence derived from human genome
RALRGLSYRSLRRRVRRLRRLTAREAATAVAALLWA

SEQ ID NO: 28829 - protein, 36 aa, Artificial Sequence
  Quasi-synthetic sequence derived from human genome
IFLVLLFSQYARNVKFPLPIYKSKKGWTAYKLQLFK

SEQ ID NO: 28830 - protein, 36 aa, Artificial Sequence
  Quasi-synthetic sequence derived from human genome
RRYFREATMKMAVMIFKRGVFESRRKNKAVFRPKIR

SEQ ID NO: 28831 - protein, 36 aa, Artificial Sequence
  Quasi-synthetic sequence derived from human genome
FLPLVVTLLVRYRHYFRLLVRTVLLRSLRDCLSGLR

SEQ ID NO: 28832 - protein, 36 aa, Artificial Sequence
  Quasi-synthetic sequence derived from human genome
LGKCFKKGLKGKGFVLLVKLACIVVASFVLCWLPFF

SEQ ID NO: 28833 - protein, 36 aa, Artificial Sequence
  Quasi-synthetic sequence derived from human genome
ARPARFSFRLRPVFNASVQFLHCQLSRCRRLRGVRR

SEQ ID NO: 28834 - protein, 36 aa, Artificial Sequence
  Quasi-synthetic sequence derived from human genome
RRRKELFRKKNKAAAVIQRAWRSYQLRKHLSHLRHM

SEQ ID NO: 28835 - protein, 36 aa, Artificial Sequence
  Quasi-synthetic sequence derived from human genome
ARRFRRWLNRYSYTVLSSWPERALISLKNRSRFLVR

SEQ ID NO: 28836 - protein, 36 aa, Artificial Sequence
  Quasi-synthetic sequence derived from human genome
PVYLAGYLGLSITWLLLGALLWMWWRRNRRGKLGRL

SEQ ID NO: 28837 - protein, 36 aa, Artificial Sequence
  Quasi-synthetic sequence derived from human genome
LGLSRMSNLSVLRSFRLLRVFKLAKSWPTLNTLIKI

SEQ ID NO: 28838 - protein, 36 aa, Artificial Sequence
  Quasi-synthetic sequence derived from human genome
PYSSPSLRIARFRFRAFHFLNRFPSVYLRCKMVVCR

SEQ ID NO: 28839 - protein, 36 aa, Artificial Sequence
  Quasi-synthetic sequence derived from human genome
LFFSALLVLLLVALSALFLGRWLVVRLATKWCQRKL

SEQ ID NO: 28840 - protein, 36 aa, Artificial Sequence
  Quasi-synthetic sequence derived from human genome
PQRPIGKAKPKKQSKKKVPFWNVQNKIILFTVFLFI

SEQ ID NO: 28841 - protein, 36 aa, Artificial Sequence
  Quasi-synthetic sequence derived from human genome
FRLLWPILGGALSLTFVLGLLSGFLVWRRCRRREKF

SEQ ID NO: 28842 - protein, 36 aa, Artificial Sequence
  Quasi-synthetic sequence derived from human genome
RVALARVSSVKLISKAKIRTVKMTFIIVLAFIVCWT

SEQ ID NO: 28843 - protein, 36 aa, Artificial Sequence
  Quasi-synthetic sequence derived from human genome
LCYVNSTVNPICYALCNRTFRKTFKMLLLCRWKKKK

SEQ ID NO: 28844 - protein, 36 aa, Artificial Sequence
  Quasi-synthetic sequence derived from human genome
RIVRALFEIALRKRWPTMTYRLLNLSKVIDKRLWGW

SEQ ID NO: 28845 - protein, 36 aa, Artificial Sequence
  Quasi-synthetic sequence derived from human genome
FCILWNWNKRKKRQVPYLRVTVMPLLTLPQTRQRAK

SEQ ID NO: 28846 - protein, 36 aa, Artificial Sequence
  Quasi-synthetic sequence derived from human genome
RALLALRTRHIKAAGGIERFRARGGLRPLLALLRRA

SEQ ID NO: 28847 - protein, 36 aa, Artificial Sequence
  Quasi-synthetic sequence derived from human genome
KGFIQKRKFQEIKNSTIKIQAMWRRYRAKKYLCKVK

SEQ ID NO: 28848 - protein, 36 aa, Artificial Sequence
  Quasi-synthetic sequence derived from human genome
VKSRWVIVGLFVSILILSLVFASRLRPASRAPLLFR

SEQ ID NO: 28849 - protein, 36 aa, Artificial Sequence
  Quasi-synthetic sequence derived from human genome
KIRRKNCPACRLRKCCQAGMVLGGRKFKKFNKVRVV

SEQ ID NO: 28850 - protein, 36 aa, Artificial Sequence
  Quasi-synthetic sequence derived from human genome
LLRGRKTFLIPVLFNNYITAALKLLEKLYKVNLKVK

SEQ ID NO: 28851 - protein, 36 aa, Artificial Sequence
  Quasi-synthetic sequence derived from human genome
FSKVRIFGLKKRRLRRQDPQLKGIVTRLYCRQGYYL

SEQ ID NO: 28852 - protein, 36 aa, Artificial Sequence
  Quasi-synthetic sequence derived from human genome
KIKLAVRMDKPAHMKHSGYLYALGQKVWKRWKKRYF

SEQ ID NO: 28853 - protein, 36 aa, Artificial Sequence
  Quasi-synthetic sequence derived from human genome
LLVGNHTQRTAILGLWKIARKWMRRKMGKWPAVVVM

SEQ ID NO: 28854 - protein, 36 aa, Artificial Sequence
  Quasi-synthetic sequence derived from human genome
KFFIDRIRRQLKVTLCFSPVGNKLRVRSRKFPAIVN

SEQ ID NO: 28855 - protein, 36 aa, Artificial Sequence
  Quasi-synthetic sequence derived from human genome
NQFCWRNLFSCINLLRILNKLTKWKHSRTMMLVVFK

SEQ ID NO: 28856 - protein, 36 aa, Artificial Sequence
  Quasi-synthetic sequence derived from human genome
IHLFRKPQRSFFGKLLREFRLVAADRRSWKILLFGV

SEQ ID NO: 28857 - protein, 36 aa, Artificial Sequence
  Quasi-synthetic sequence derived from human genome
LQRCLAVTRPFLAPRLRSPALARRLLLAVWLAALLL

SEQ ID NO: 28858 - protein, 36 aa, Artificial Sequence
  Quasi-synthetic sequence derived from human genome
RGRRRRMHVLRRRWDLGSLCRALLTRGLAALGHSLK

SEQ ID NO: 28859 - protein, 36 aa, Artificial Sequence
  Quasi-synthetic sequence derived from human genome
RKRPLTLLQRAGLLLLLGLLGFLALLALMSRLGRAA

SEQ ID NO: 28860 - protein, 36 aa, Artificial Sequence
  Quasi-synthetic sequence derived from human genome
MFPKVRESQLLLNVVSQLAKRNLRLLVLGRKHMLRR

SEQ ID NO: 28861 - protein, 36 aa, Artificial Sequence
  Quasi-synthetic sequence derived from human genome
RKKTIANYLVWRMVYSRIPNLSRRFQYRWLEFSRVI

SEQ ID NO: 28862 - protein, 36 aa, Artificial Sequence
  Quasi-synthetic sequence derived from human genome
LCARVRKLRSAGRCGKFHQVRRVMTILFLTMVISYF

SEQ ID NO: 28863 - protein, 36 aa, Artificial Sequence
  Quasi-synthetic sequence derived from human genome
KLAPAMKTQKLRYRRCSSELLPMAKSYKRLRYKRLL

SEQ ID NO: 28864 - protein, 36 aa, Artificial Sequence
  Quasi-synthetic sequence derived from human genome
KVFYKFLNSNRPKIRHTEKKSFKCKKRVKLFCMLSH

SEQ ID NO: 28865 - protein, 36 aa, Artificial Sequence
  Quasi-synthetic sequence derived from human genome
KRARKAMSKLGLLQVTGVTRVTIWKSKNILFVITKL

SEQ ID NO: 28866 - protein, 36 aa, Artificial Sequence
  Quasi-synthetic sequence derived from human genome
VRRIRSLQRSVQVLRAIVVMYVICWLPYHARRLMYC

SEQ ID NO: 28867 - protein, 36 aa, Artificial Sequence
  Quasi-synthetic sequence derived from human genome
RKAFAKRQQQLTAMKVIQRNCAAYLKLRNWQWWRLF

SEQ ID NO: 28868 - protein, 36 aa, Artificial Sequence
  Quasi-synthetic sequence derived from human genome
LKYLNMYASICFLTCISLQRCFFLLKPFRARDWKRR

SEQ ID NO: 28869 - protein, 36 aa, Artificial Sequence
  Quasi-synthetic sequence derived from human genome
MGLKVIQQNVHKFLQLRFWGWWKLYNKVKPLLNVAR

SEQ ID NO: 28870 - protein, 36 aa, Artificial Sequence
  Quasi-synthetic sequence derived from human genome
GRHMGIGKRKGTANARMPEKVTWMRRMRILRRLLRR

SEQ ID NO: 28871 - protein, 36 aa, Artificial Sequence
  Quasi-synthetic sequence derived from human genome
LPGLLFGAPALLGLALVLALVLVGLVSWRRRQRRLR

SEQ ID NO: 28872 - protein, 36 aa, Artificial Sequence
  Quasi-synthetic sequence derived from human genome
RVRGRVLKKFKSDSGLAQRRFIRGWGLCIFLPFVLS

SEQ ID NO: 28873 - protein, 36 aa, Artificial Sequence
  Quasi-synthetic sequence derived from human genome
KRKFKSLLLHKRTAIQHAYRLLISQRRPAGISYRQF

SEQ ID NO: 28874 - protein, 36 aa, Artificial Sequence
  Quasi-synthetic sequence derived from human genome
VVRKILLLQSWFRMVLERRHFLQMKRAAVTIQACWR

SEQ ID NO: 28875 - protein, 36 aa, Artificial Sequence
  Quasi-synthetic sequence derived from human genome
FLATIMGVRFKRSKKIMPAGLVAGLSLMMILRLVLL

SEQ ID NO: 28876 - protein, 36 aa, Artificial Sequence
  Quasi-synthetic sequence derived from human genome
VILLALGALLVLQLIRRRRREHGALWLPPGFTRRPR

SEQ ID NO: 28877 - protein, 36 aa, Artificial Sequence
  Quasi-synthetic sequence derived from human genome
LLTWKLILTFFKAASSQLRALYSMYLRKTKSLNKLL

SEQ ID NO: 28878 - protein, 36 aa, Artificial Sequence
  Quasi-synthetic sequence derived from human genome
RVITPEDLLFLMRKDKKKLRRLLKYMFIRDYKSKIV

SEQ ID NO: 28879 - protein, 36 aa, Artificial Sequence
  Quasi-synthetic sequence derived from human genome
VAWRRAWPRRRRRLQQVGTVAKLWIYPVKSCKGVPV

SEQ ID NO: 28880 - protein, 36 aa, Artificial Sequence
  Quasi-synthetic sequence derived from human genome
LVLGQSLRRHRLTRKLVVLITPQVSSLLRVILSKVF

SEQ ID NO: 28881 - protein, 36 aa, Artificial Sequence
  Quasi-synthetic sequence derived from human genome
RGRLFYTAKAKKTGKVMIRIHPCARLCFCKCWTCFK

SEQ ID NO: 28882 - protein, 36 aa, Artificial Sequence
  Quasi-synthetic sequence derived from human genome
VRSKKIFLSKLIVCFLSTWLPFVLLQVIIVLLKVQI

SEQ ID NO: 28883 - protein, 36 aa, Artificial Sequence
  Quasi-synthetic sequence derived from human genome
VIGRMRTRLVRKRFLCLGWGLPALVVAVSVGFTRTK

SEQ ID NO: 28884 - protein, 36 aa, Artificial Sequence
  Quasi-synthetic sequence derived from human genome
LIYRDRLRINRFAWPKVLKISYKRNNFYIKIRPGEF

SEQ ID NO: 28885 - protein, 36 aa, Artificial Sequence
  Quasi-synthetic sequence derived from human genome
MRRLTRRLVLPVFGVLWITVLLFFWVTKRKLEVPTG

SEQ ID NO: 28886 - protein, 36 aa, Artificial Sequence
  Quasi-synthetic sequence derived from human genome
NRYLTRRRRIEIAHALCLTERQIKIWFQNRRMKWKK

SEQ ID NO: 28887 - protein, 36 aa, Artificial Sequence
  Quasi-synthetic sequence derived from human genome
YNKTKMAFLLVGICFLCKLCTIIFTTIAFFIYKRRL

SEQ ID NO: 28888 - protein, 36 aa, Artificial Sequence
  Quasi-synthetic sequence derived from human genome
GKCALVRHKFNRLPRVLILHLKRYSFNVALSLNNKI

SEQ ID NO: 28889 - protein, 36 aa, Artificial Sequence
  Quasi-synthetic sequence derived from human genome
FPDHKKITVWLDLLKPIVKQIRRPKHVVVKFVVKFF

SEQ ID NO: 28890 - protein, 36 aa, Artificial Sequence
  Quasi-synthetic sequence derived from human genome
GNSKGKDINTIKSLRVLRVLRPLKTIKRLPKLKAVF

SEQ ID NO: 28891 - protein, 36 aa, Artificial Sequence
  Quasi-synthetic sequence derived from human genome
RGWVALVLHLRAHSAAKRPIACPKCERRFWRRKQLR

SEQ ID NO: 28892 - protein, 36 aa, Artificial Sequence
  Quasi-synthetic sequence derived from human genome
IFLTESNKSVLQFQNVRRVVQIFRIMRILRILKLAR

SEQ ID NO: 28893 - protein, 36 aa, Artificial Sequence
  Quasi-synthetic sequence derived from human genome
RPFVPSRCNHRFPFQPFYWPHRYLTYRYFPRRRLQR

SEQ ID NO: 28894 - protein, 36 aa, Artificial Sequence
  Quasi-synthetic sequence derived from human genome
RLLFAKLFGHLTSARRARKSEVPHFRLKKVQNIKMW

SEQ ID NO: 28895 - protein, 36 aa, Artificial Sequence
  Quasi-synthetic sequence derived from human genome
LKAGRRWNKYFKSRRPLFTGGLIGGLFTYVLFWTFL

SEQ ID NO: 28896 - protein, 36 aa, Artificial Sequence
  Quasi-synthetic sequence derived from human genome
ITFFRLFRVMRLVKLLSRGEGIRTLLWTFIKSFQAL

SEQ ID NO: 28897 - protein, 36 aa, Artificial Sequence
  Quasi-synthetic sequence derived from human genome
RRPRPRLARPRAGQKPWLLVIRSMERVMYVMLIIQM

SEQ ID NO: 28898 - protein, 36 aa, Artificial Sequence
  Quasi-synthetic sequence derived from human genome
KLQRYALNRITVWRSRFVNLISERKTKFAKVPLKCL

SEQ ID NO: 28899 - protein, 36 aa, Artificial Sequence
  Quasi-synthetic sequence derived from human genome
FVPVVVSRLVLRSMSRRDVLIKRWPPPLRWQYFRSL

SEQ ID NO: 28900 - protein, 36 aa, Artificial Sequence
  Quasi-synthetic sequence derived from human genome
LRRADTRRWKKKQLRRPSLLLLGCCSFGIMAPSLWK

SEQ ID NO: 28901 - protein, 36 aa, Artificial Sequence
  Quasi-synthetic sequence derived from human genome
HVLCLTLGYFIFDLGCIWRFAWRKSIKKYHAWRSRR

SEQ ID NO: 28902 - protein, 36 aa, Artificial Sequence
  Quasi-synthetic sequence derived from human genome
MARKKLKKFTTLEIVLSVLLLVLFIISIVLIVLLAK

SEQ ID NO: 28903 - protein, 36 aa, Artificial Sequence
  Quasi-synthetic sequence derived from human genome
RKFASIARNQVRKKRQMAARERKVTRTIFAILLAFI

SEQ ID NO: 28904 - protein, 36 aa, Artificial Sequence
  Quasi-synthetic sequence derived from human genome
VRLFLKNYSKTRFGYRIKWRIICGNNSTVIFFHFLV

SEQ ID NO: 28905 - protein, 36 aa, Artificial Sequence
  Quasi-synthetic sequence derived from human genome
PRTPMSWSRIKKILKEGPMLKNCNSFKRWKLRYFLV

SEQ ID NO: 28906 - protein, 36 aa, Artificial Sequence
  Quasi-synthetic sequence derived from human genome
RELRALLLWGRRLRPLLRAPALAAVPGGKPILCPRR

SEQ ID NO: 28907 - protein, 36 aa, Artificial Sequence
  Quasi-synthetic sequence derived from human genome
IRHMIRKNKYRPDLRMAAIRRASAILRSQKPVMVKR

SEQ ID NO: 28908 - protein, 36 aa, Artificial Sequence
  Quasi-synthetic sequence derived from human genome
MTVIISIMSSFAIFVLLTITTLYCCRRRKQWKNKKR

SEQ ID NO: 28909 - protein, 36 aa, Artificial Sequence
  Quasi-synthetic sequence derived from human genome
AWASRWLRRKLRARRKGGAPVHVRHMYSTRRPLRSM

SEQ ID NO: 28910 - protein, 36 aa, Artificial Sequence
  Quasi-synthetic sequence derived from human genome
KKAVKYQSQARKKLIIIIVLVVVLLGILALIIGLSV

SEQ ID NO: 28911 - protein, 36 aa, Artificial Sequence
  Quasi-synthetic sequence derived from human genome
RRRFFWKTLTDWKTWISFWKTLIDWKTWISFWKTLI

SEQ ID NO: 28912 - protein, 36 aa, Artificial Sequence
  Quasi-synthetic sequence derived from human genome
KCAIIIQSYYRMHVQQKKWKIMKKAALLIQKYYRAY

SEQ ID NO: 28913 - protein, 36 aa, Artificial Sequence
  Quasi-synthetic sequence derived from human genome
GCTLLHCFVILPVFLTFFPPSKKHHKKKKRAKRKER

SEQ ID NO: 28914 - protein, 36 aa, Artificial Sequence
  Quasi-synthetic sequence derived from human genome
LFQWVYQRRGLVHLCCSKLVNYLTPIKYLRKSLKII

SEQ ID NO: 28915 - protein, 36 aa, Artificial Sequence
  Quasi-synthetic sequence derived from human genome
YKACLPPSLRDLIQGLSFVTRRRIRRTVRRALRRVA

SEQ ID NO: 28916 - protein, 36 aa, Artificial Sequence
  Quasi-synthetic sequence derived from human genome
NRYLTRRRRIEIAHALCLSERQIKIWFQNRRMKWKK

SEQ ID NO: 28917 - protein, 36 aa, Artificial Sequence
  Quasi-synthetic sequence derived from human genome
KVIKYIWRIGTDGRTVRRTMNIVPRTKVKTIKMFLI

SEQ ID NO: 28918 - protein, 36 aa, Artificial Sequence
  Quasi-synthetic sequence derived from human genome
IRIMRVLRIARVLKLLKMAVGMRALLDTVGNLGLLF

SEQ ID NO: 28919 - protein, 36 aa, Artificial Sequence
  Quasi-synthetic sequence derived from human genome
LWRQQICAIARVRLLKLKHERKALLALLLILMAGFC

SEQ ID NO: 28920 - protein, 36 aa, Artificial Sequence
  Quasi-synthetic sequence derived from human genome
LGYLGLSFSWVLLALALLAWCRRSRGLKALRLCRAL

SEQ ID NO: 28921 - protein, 36 aa, Artificial Sequence
  Quasi-synthetic sequence derived from human genome
LLQRIAMLWGSGKCKALTKFKFVFFLRLSRAQGGLF

SEQ ID NO: 28922 - protein, 36 aa, Artificial Sequence
  Quasi-synthetic sequence derived from human genome
MAITQFRLFKFCTCLATVFSFLKRLICRSGRGRKLS

SEQ ID NO: 28923 - protein, 36 aa, Artificial Sequence
  Quasi-synthetic sequence derived from human genome
MMRTQCLLGLRTFVAFAAKLWSFFIYLLRRQIRTVI

SEQ ID NO: 28924 - protein, 36 aa, Artificial Sequence
  Quasi-synthetic sequence derived from human genome
KYFFFLSERKMSKKFVELKKAGLLVWNLIVIICRIF

SEQ ID NO: 28925 - protein, 36 aa, Artificial Sequence
  Quasi-synthetic sequence derived from human genome
IHKLFAPVRISITLVSVPLIVRYFRKVGFFKPPAAK

SEQ ID NO: 28926 - protein, 36 aa, Artificial Sequence
  Quasi-synthetic sequence derived from human genome
RRRQAGRRLRYLPTGSFPFLLLLLLLCIQLGGGQKK

SEQ ID NO: 28927 - protein, 36 aa, Artificial Sequence
  Quasi-synthetic sequence derived from human genome
RTLQLSVLVAFASGVLLGWQANRLRRRYLDWRKRRL

SEQ ID NO: 28928 - protein, 36 aa, Artificial Sequence
  Quasi-synthetic sequence derived from human genome
LARFLLKRGLRNKRIGHFLFWFLRSEIAQSRHYQQR

SEQ ID NO: 28929 - protein, 36 aa, Artificial Sequence
  Quasi-synthetic sequence derived from human genome
GHVLYSGWLRKSPPEKKLRLFAWRKRWFILRRGQTS

SEQ ID NO: 28930 - protein, 36 aa, Artificial Sequence
  Quasi-synthetic sequence derived from human genome
LTRKSGSLVQFLLYKYKIKKSVTKGEMLKIVGKRFR

SEQ ID NO: 28931 - protein, 36 aa, Artificial Sequence
  Quasi-synthetic sequence derived from human genome
RSVAGLLPRRRRCFPARAPLLRVALCLLCWTPAAVR

SEQ ID NO: 28932 - protein, 36 aa, Artificial Sequence
  Quasi-synthetic sequence derived from human genome
AWMKRLAVFSQPIINKVKPQLLKTHFLPLMEKLKKK

SEQ ID NO: 28933 - protein, 36 aa, Artificial Sequence
  Quasi-synthetic sequence derived from human genome
LLQILRQDMTPGGGPGARRRQRGRLMRRLVRRLRRW

SEQ ID NO: 28934 - protein, 36 aa, Artificial Sequence
  Quasi-synthetic sequence derived from human genome
FTPAMQRKKLKDFSGGWRMRVALARALFIRPFMLLL

SEQ ID NO: 28935 - protein, 36 aa, Artificial Sequence
  Quasi-synthetic sequence derived from human genome
FRFWPFLVIIVILSALFLGTLACFCVWRRKRKEKQS

SEQ ID NO: 28936 - protein, 36 aa, Artificial Sequence
  Quasi-synthetic sequence derived from human genome
GPLLSPVPKLCRIKASKALKKKIRRFQPTALKVMTM

SEQ ID NO: 28937 - protein, 36 aa, Artificial Sequence
  Quasi-synthetic sequence derived from human genome
IRNMSWPRLIRKLRCYLKEMKNLRKLVFSRCHHYTS

SEQ ID NO: 28938 - protein, 36 aa, Artificial Sequence
  Quasi-synthetic sequence derived from human genome
ILASQKVKKIWQKQFRWPKNRLQILKFCKAREDLLK

SEQ ID NO: 28939 - protein, 36 aa, Artificial Sequence
  Quasi-synthetic sequence derived from human genome
LLGVARSLWMLLKLRQRLRSPTAPFTSPLPRGKRRA

SEQ ID NO: 28940 - protein, 36 aa, Artificial Sequence
  Quasi-synthetic sequence derived from human genome
LHCCLNPVLYAFIGQKFRNYFLKILKDLWCVRRKYK

SEQ ID NO: 28941 - protein, 36 aa, Artificial Sequence
  Quasi-synthetic sequence derived from human genome
RFLRTRNLIAPIFLHRTLTYMSHRNSRTNIKRKTFK

SEQ ID NO: 28942 - protein, 36 aa, Artificial Sequence
  Quasi-synthetic sequence derived from human genome
WIRLSLEKKLLSQHLKQLLSNQPLTKKLYKRYAFLR

SEQ ID NO: 28943 - protein, 36 aa, Artificial Sequence
  Quasi-synthetic sequence derived from human genome
IGWFLALSSMVCVPLFVVITLLKTRGPFRKRLRQLI

SEQ ID NO: 28944 - protein, 36 aa, Artificial Sequence
  Quasi-synthetic sequence derived from human genome
ITFFRLFRVMRLVKLLSKGEGIRTLLWTFIKSFQAL

SEQ ID NO: 28945 - protein, 36 aa, Artificial Sequence
  Quasi-synthetic sequence derived from human genome
VITPEDLLFLMRKDKKKLRRLLKYMFIRDYKSKIVK

SEQ ID NO: 28946 - protein, 36 aa, Artificial Sequence
  Quasi-synthetic sequence derived from human genome
QRRESIFCIQYNIRSFMNVKHWPWMKLFFKIKPLLK

SEQ ID NO: 28947 - protein, 36 aa, Artificial Sequence
  Quasi-synthetic sequence derived from human genome
TASCLVLFPRFLGTAFMLWLLDFLCIRKHFLGRRRR

SEQ ID NO: 28948 - protein, 36 aa, Artificial Sequence
  Quasi-synthetic sequence derived from human genome
RGHPRSYPYWRRLLVLCWYLPGWRAGRVTWLRLATW

SEQ ID NO: 28949 - protein, 36 aa, Artificial Sequence
  Quasi-synthetic sequence derived from human genome
FLLAVVLTVAFITFKCCAYGYRKCLGKKGRVKKAHK

SEQ ID NO: 28950 - protein, 36 aa, Artificial Sequence
  Quasi-synthetic sequence derived from human genome
VPKPVSKKHGKLITFLRTFMKSRPTKQKLKQRGILK

SEQ ID NO: 28951 - protein, 36 aa, Artificial Sequence
  Quasi-synthetic sequence derived from human genome
IRRAKKIPKINILHKQTSGYIVYGLFMLHTKIVNRK

SEQ ID NO: 28952 - protein, 36 aa, Artificial Sequence
  Quasi-synthetic sequence derived from human genome
KKLRNGVKYCKVLRLPEILCIHLKRFRHEVMYSFKI

SEQ ID NO: 28953 - protein, 36 aa, Artificial Sequence
  Quasi-synthetic sequence derived from human genome
YKSIYFLGHIFFLSLLFILPYIHKAMVPRKEKLKKM

SEQ ID NO: 28954 - protein, 36 aa, Artificial Sequence
  Quasi-synthetic sequence derived from human genome
WLIYKNTKLVKKIDHAKVRKHQRKFLQAIHQLRSVK

SEQ ID NO: 28955 - protein, 36 aa, Artificial Sequence
  Quasi-synthetic sequence derived from human genome
KKIAMREIKLLKQLRHENLVNLLEVCKKKKRWYLVF

SEQ ID NO: 28956 - protein, 36 aa, Artificial Sequence
  Quasi-synthetic sequence derived from human genome
LVAISVTLLLVVLALGGVVWYQHRQRKLRRNRRSIL

SEQ ID NO: 28957 - protein, 36 aa, Artificial Sequence
  Quasi-synthetic sequence derived from human genome
LFRILKVFKSLRALRAIRVLRRLSFLTSVQEVTGTL

SEQ ID NO: 28958 - protein, 36 aa, Artificial Sequence
  Quasi-synthetic sequence derived from human genome
KLRTKAMARRVLAGIWVLSFLLATPVLAYRTVVPWK

SEQ ID NO: 28959 - protein, 36 aa, Artificial Sequence
  Quasi-synthetic sequence derived from human genome
RILRLIKGAKGIRTLLFALMMSLPALFNIGLLLFLV

SEQ ID NO: 28960 - protein, 36 aa, Artificial Sequence
  Quasi-synthetic sequence derived from human genome
NFSNLIFLRLKRRVKSVILVVLLGPLLFLACHLFVV

SEQ ID NO: 28961 - protein, 36 aa, Artificial Sequence
  Quasi-synthetic sequence derived from human genome
KFYLFPLKMITWTMPTAVFFICMILLITSLGRHRKK

SEQ ID NO: 28962 - protein, 36 aa, Artificial Sequence
  Quasi-synthetic sequence derived from human genome
LKCKSKRRRRRRSKRKDKVSILSTFLAPFKHLSPGI

SEQ ID NO: 28963 - protein, 36 aa, Artificial Sequence
  Quasi-synthetic sequence derived from human genome
KAFKIRKHYLHLRATVVSIQRRYRKLTAVRTQAVIC

SEQ ID NO: 28964 - protein, 36 aa, Artificial Sequence
  Quasi-synthetic sequence derived from human genome
FFPYRLVGLAVGLYAGIKFFLIDFIFKRCPRLRAKY

SEQ ID NO: 28965 - protein, 36 aa, Artificial Sequence
  Quasi-synthetic sequence derived from human genome
ALRIWAAGCCCRYKGWRGRLKFARKPLCMLDIFVLI

SEQ ID NO: 28966 - protein, 36 aa, Artificial Sequence
  Quasi-synthetic sequence derived from human genome
GVGIAGALFILGALYSIKVMNRRRRNGFKRHKRKQR

SEQ ID NO: 28967 - protein, 36 aa, Artificial Sequence
  Quasi-synthetic sequence derived from human genome
LRCRNEKKRHRAVRVIFTIMIVYFLFWTPYNIVILL

SEQ ID NO: 28968 - protein, 36 aa, Artificial Sequence
  Quasi-synthetic sequence derived from human genome
KSKKICPLYWYKFAKTFLIWNCSPCWLKLKEFVHRI

SEQ ID NO: 28969 - protein, 36 aa, Artificial Sequence
  Quasi-synthetic sequence derived from human genome
KFFIEKVRRQLKVILCFSPVGSVLRVRARKFPAVVN

SEQ ID NO: 28970 - protein, 36 aa, Artificial Sequence
  Quasi-synthetic sequence derived from human genome
RSLKPMQTRVVGRLQKPCFFFHWLKLFAIPILLIAV

SEQ ID NO: 28971 - protein, 36 aa, Artificial Sequence
  Quasi-synthetic sequence derived from human genome
MCFLRRPGAPASWIWWRMLRQVLRRGLQSFCHRLGL

SEQ ID NO: 28972 - protein, 36 aa, Artificial Sequence
  Quasi-synthetic sequence derived from human genome
RGPRSGLAAYFFMGRLPLLRRVLKGLQLLLSLLAFI

SEQ ID NO: 28973 - protein, 36 aa, Artificial Sequence
  Quasi-synthetic sequence derived from human genome
YLIRIRKLTLKRQRKLVPLSKKVERREKRREEKALI

SEQ ID NO: 28974 - protein, 36 aa, Artificial Sequence
  Quasi-synthetic sequence derived from human genome
IVRIRGTRMYQPLTEDEIRIFKRKKRIKRRALLFLS

SEQ ID NO: 28975 - protein, 36 aa, Artificial Sequence
  Quasi-synthetic sequence derived from human genome
LLRKYRRELQLRKKCHNELVRLKGNIRVIARVRPVT

SEQ ID NO: 28976 - protein, 36 aa, Artificial Sequence
  Quasi-synthetic sequence derived from human genome
ETYFVSPTLFRVIRLARIGRILRLVKGAKGIRTLLF

SEQ ID NO: 28977 - protein, 36 aa, Artificial Sequence
  Quasi-synthetic sequence derived from human genome
LFCLRLMHIFTISKTLGPKIIIVKRMMKDVFFFLFL

SEQ ID NO: 28978 - protein, 36 aa, Artificial Sequence
  Quasi-synthetic sequence derived from human genome
LRWAGYRPGPVRRRGKVELIKFVRVQWRRPQVEWRR

SEQ ID NO: 28979 - protein, 36 aa, Artificial Sequence
  Quasi-synthetic sequence derived from human genome
WRFLRIVCKTARRDLFGLSVLIRVRLELRRHQRAGH

SEQ ID NO: 28980 - protein, 36 aa, Artificial Sequence
  Quasi-synthetic sequence derived from human genome
CLTLLIALLSINGFAYFIRRRINKIQLIKGPNRILL

SEQ ID NO: 28981 - protein, 36 aa, Artificial Sequence
  Quasi-synthetic sequence derived from human genome
KVKFDIRYIVLLRSVRPLRLFVYDVFWLRFSNRAFA

SEQ ID NO: 28982 - protein, 36 aa, Artificial Sequence
  Quasi-synthetic sequence derived from human genome
VKRLHKVLRPFLLRRVKVDVEKQMPKKYEHVIRCRL

SEQ ID NO: 28983 - protein, 36 aa, Artificial Sequence
  Quasi-synthetic sequence derived from human genome
RGWMARRHFQRLRDAAIVIQCAFRMLKARRELKALR

SEQ ID NO: 28984 - protein, 36 aa, Artificial Sequence
  Quasi-synthetic sequence derived from human genome
IPSPKSLWYLIKWIWTHLCKKKMRRKPESFGTIGRR

SEQ ID NO: 28985 - protein, 36 aa, Artificial Sequence
  Quasi-synthetic sequence derived from human genome
YLKIVLDTFVYQIPRRIFIQLMKRFGLKATTKINWK

SEQ ID NO: 28986 - protein, 36 aa, Artificial Sequence
  Quasi-synthetic sequence derived from human genome
LVIRAAVAGFFAVLFLWRSFRSVTSRLYVRREKKFA

SEQ ID NO: 28987 - protein, 36 aa, Artificial Sequence
  Quasi-synthetic sequence derived from human genome
LLWKNYTLQKRKVLVTVLELFLPLLFSGILIWLRLK

SEQ ID NO: 28988 - protein, 36 aa, Artificial Sequence
  Quasi-synthetic sequence derived from human genome
LQQGNMHKNMRVLSRTSKFRRLRQLLRRRKKRRQGR

SEQ ID NO: 28989 - protein, 36 aa, Artificial Sequence
  Quasi-synthetic sequence derived from human genome
AFKSKKICKSLKICGLVFGILALTLIVLFWGSKHFW

SEQ ID NO: 28990 - protein, 36 aa, Artificial Sequence
  Quasi-synthetic sequence derived from human genome
WLAYKTPKLLRTARGRRIKKCATQLCRRCKTVCQFR

SEQ ID NO: 28991 - protein, 36 aa, Artificial Sequence
  Quasi-synthetic sequence derived from human genome
LRKRGLLVAAVLFITGIIILTSGKCRQLSRLCRNRC

SEQ ID NO: 28992 - protein, 36 aa, Artificial Sequence
  Quasi-synthetic sequence derived from human genome
RFKVMKAKKMRNRIIKNEVKKLQKAALLKASPKKAP

SEQ ID NO: 28993 - protein, 36 aa, Artificial Sequence
  Quasi-synthetic sequence derived from human genome
RWIVGKVIGTKMQKTAKVRVTRLVLDPYLLKYFNKR

SEQ ID NO: 28994 - protein, 36 aa, Artificial Sequence
  Quasi-synthetic sequence derived from human genome
LIIQSMFRKWKQRKMQSQVKATVILQRAFREWHLRK

SEQ ID NO: 28995 - protein, 36 aa, Artificial Sequence
  Quasi-synthetic sequence derived from human genome
KKLILKQALIVVLQWCFNHNFSVRLYALVALKKLWT

SEQ ID NO: 28996 - protein, 36 aa, Artificial Sequence
  Quasi-synthetic sequence derived from human genome
VRLGPMALAFKVRGLLDCKHSWKRLKDIRKIFPGKK

SEQ ID NO: 28997 - protein, 36 aa, Artificial Sequence
  Quasi-synthetic sequence derived from human genome
RTLMHLSRCAIRRTLHNRCHRAIPLLSLPLSLKKYL

SEQ ID NO: 28998 - protein, 36 aa, Artificial Sequence
  Quasi-synthetic sequence derived from human genome
VVKQPAFIAGIGGACWVILMGFSIWLYWRRKKRKGL

SEQ ID NO: 28999 - protein, 36 aa, Artificial Sequence
  Quasi-synthetic sequence derived from human genome
RLLLKFIKIMKHLRKLNNFNSYLAILSALDSAPIRR

SEQ ID NO: 29000 - protein, 36 aa, Artificial Sequence
  Quasi-synthetic sequence derived from human genome
ARLKILETLKLLMQHTWPRVSCRLVVLLKALLKLIC

SEQ ID NO: 29001 - protein, 37 aa, Artificial Sequence
  Quasi-synthetic sequence derived from human genome
KRKKKKKFCYLCILLLIVLFILLCCLYRLCKKSKPIK

SEQ ID NO: 29002 - protein, 37 aa, Artificial Sequence
  Quasi-synthetic sequence derived from human genome
WLRVRKARPQLILSRRPRRRLGSLRWCGRRRLRWRLL

SEQ ID NO: 29003 - protein, 37 aa, Artificial Sequence
  Quasi-synthetic sequence derived from human genome
FLLLVILAMGLWVIRVQKRHKMPRMKKLMRNRMKLRK

SEQ ID NO: 29004 - protein, 37 aa, Artificial Sequence
  Quasi-synthetic sequence derived from human genome
KRKKRIKRRALLFLSYILTHFIFLALLLILIVLLRHT

SEQ ID NO: 29005 - protein, 37 aa, Artificial Sequence
  Quasi-synthetic sequence derived from human genome
RLIPIIVLLLQKAWRGTLARWRCRRLRAIYTIMRWFR

SEQ ID NO: 29006 - protein, 37 aa, Artificial Sequence
  Quasi-synthetic sequence derived from human genome
RRKSWRLEFLFLRRRCFLLTFYLWFLFFSRFLLMLFL

SEQ ID NO: 29007 - protein, 37 aa, Artificial Sequence
  Quasi-synthetic sequence derived from human genome
IPRWTHLLRLLRLIILLRIFHLFHQKRQLEKLIRRRV

SEQ ID NO: 29008 - protein, 37 aa, Artificial Sequence
  Quasi-synthetic sequence derived from human genome
HLKRLVKLHIKRHYHKKFWKLGAVIFFFIIVLVLMQR

SEQ ID NO: 29009 - protein, 37 aa, Artificial Sequence
  Quasi-synthetic sequence derived from human genome
RLLKRLLGPKLRRFLKPQGHPRLLLWFKRGLALAAFL

SEQ ID NO: 29010 - protein, 37 aa, Artificial Sequence
  Quasi-synthetic sequence derived from human genome
KRFLKHAGKWSLRWFLSPRWILQFRRWARKWSRFTRS

SEQ ID NO: 29011 - protein, 37 aa, Artificial Sequence
  Quasi-synthetic sequence derived from human genome
IYWPRFIRHKCKQRFTKITQYLIRIRKLTLKRQRKLV

SEQ ID NO: 29012 - protein, 37 aa, Artificial Sequence
  Quasi-synthetic sequence derived from human genome
RNIPRWTHLLRLLRLIILLRIFHLFHQKRQLEKLIRR

SEQ ID NO: 29013 - protein, 37 aa, Artificial Sequence
  Quasi-synthetic sequence derived from human genome
RKQYRKVLYCVVIIQKNYRAFLLRRRFLHLKKAAIVF

SEQ ID NO: 29014 - protein, 37 aa, Artificial Sequence
  Quasi-synthetic sequence derived from human genome
INFLAKQRLRKRVNAALVIQKYWRRVLAQRKLLMLKK

SEQ ID NO: 29015 - protein, 37 aa, Artificial Sequence
  Quasi-synthetic sequence derived from human genome
FRIYAVSTLLLFLLFFLFRLLLRFLRLCRSFYITCRR

SEQ ID NO: 29016 - protein, 37 aa, Artificial Sequence
  Quasi-synthetic sequence derived from human genome
KSWRRRSCWRKWKQLSRLQRNMILFLLAFLLFCGLLF

SEQ ID NO: 29017 - protein, 37 aa, Artificial Sequence
  Quasi-synthetic sequence derived from human genome
KSKLSRRWRRWNRFNRRRCRAAVKSVTFYWLVIVLVF

SEQ ID NO: 29018 - protein, 37 aa, Artificial Sequence
  Quasi-synthetic sequence derived from human genome
KRWTHLVRLLRLIILIRIFHLLHQKRQLEKLMRRLVS

SEQ ID NO: 29019 - protein, 37 aa, Artificial Sequence
  Quasi-synthetic sequence derived from human genome
RLCLRLLLLLGYRRRCPPLLRGLVQRWRYGKVCLRSL

SEQ ID NO: 29020 - protein, 37 aa, Artificial Sequence
  Quasi-synthetic sequence derived from human genome
GMKRALGRRKGVWLRLRKILFCVLGLYIAIPFLIKLC

SEQ ID NO: 29021 - protein, 37 aa, Artificial Sequence
  Quasi-synthetic sequence derived from human genome
RLKLFFIKNQRSSLRIRLFNFSLKLLSCLLYIIRVLL

SEQ ID NO: 29022 - protein, 37 aa, Artificial Sequence
  Quasi-synthetic sequence derived from human genome
WRMYVVRRRYKIRRAATIVLQSYLRGFLARNRYRKIL

SEQ ID NO: 29023 - protein, 37 aa, Artificial Sequence
  Quasi-synthetic sequence derived from human genome
PLVYALASRHFRARFRRLWPCGRRRRHRARRALRRVR

SEQ ID NO: 29024 - protein, 37 aa, Artificial Sequence
  Quasi-synthetic sequence derived from human genome
KFSRYWRRWNRFCRRKCRAAVKSNVFYWLVIFLVFLN

SEQ ID NO: 29025 - protein, 37 aa, Artificial Sequence
  Quasi-synthetic sequence derived from human genome
WWRGVLVRRTLLVAALRAWMIQCWWRTLVQRRIRQRR

SEQ ID NO: 29026 - protein, 37 aa, Artificial Sequence
  Quasi-synthetic sequence derived from human genome
LILSLLVLFFSAVFVAAGLFAYVLRRRRKKLPFRSKR

SEQ ID NO: 29027 - protein, 37 aa, Artificial Sequence
  Quasi-synthetic sequence derived from human genome
RLKLFFIKNQRSSLRIRLFNFSLKLLTCLLYIVRVLL

SEQ ID NO: 29028 - protein, 37 aa, Artificial Sequence
  Quasi-synthetic sequence derived from human genome
RIPLLRKRRFQLGRSMNPRARKNRSRIPLLRKRRFQL

SEQ ID NO: 29029 - protein, 37 aa, Artificial Sequence
  Quasi-synthetic sequence derived from human genome
RFSFFLQIYLIMIFLGLYINFRHLYKQRRRRYGQKKK

SEQ ID NO: 29030 - protein, 37 aa, Artificial Sequence
  Quasi-synthetic sequence derived from human genome
IPRWTHLVRLLRLIILIRIFHLLHQKRQLEKLMRRLV

SEQ ID NO: 29031 - protein, 37 aa, Artificial Sequence
  Quasi-synthetic sequence derived from human genome
FCLLAKGLLIFLLLVILAMGLWVIRVQKRHKMPRMKK

SEQ ID NO: 29032 - protein, 37 aa, Artificial Sequence
  Quasi-synthetic sequence derived from human genome
ILRGKMMQRRPRSAEVKYFYFFKILLRLRLAILKYLF

SEQ ID NO: 29033 - protein, 37 aa, Artificial Sequence
  Quasi-synthetic sequence derived from human genome
LIVRVLVRAHRHRGLRPRRQKALRMILAVVLVFFVCW

SEQ ID NO: 29034 - protein, 37 aa, Artificial Sequence
  Quasi-synthetic sequence derived from human genome
MRRLRRLAHLVLFCPFSKRLQGRLPGLRVRCIFLAWL

SEQ ID NO: 29035 - protein, 37 aa, Artificial Sequence
  Quasi-synthetic sequence derived from human genome
KYFFSPTLFRVIRLARIGRILRLIRGAKGIRTLLFAL

SEQ ID NO: 29036 - protein, 37 aa, Artificial Sequence
  Quasi-synthetic sequence derived from human genome
IPLVRKRRFQLRRCMNPRARKNRSQIVLFQKRRFHFF

SEQ ID NO: 29037 - protein, 37 aa, Artificial Sequence
  Quasi-synthetic sequence derived from human genome
WRRYGKLSRHLMKVKLKKYTKFLFVRDPFVRLISAFR

SEQ ID NO: 29038 - protein, 37 aa, Artificial Sequence
  Quasi-synthetic sequence derived from human genome
RIPLLRKRRFQLYRSTNPRARKNRSRIPLLRKRRFQL

SEQ ID NO: 29039 - protein, 37 aa, Artificial Sequence
  Quasi-synthetic sequence derived from human genome
RCNRRLKSQILLKKYLMKRRWKKNFIAVSAANRFKKI

SEQ ID NO: 29040 - protein, 37 aa, Artificial Sequence
  Quasi-synthetic sequence derived from human genome
RFLKIIRPLRNIFLKKPVFAKTVSIFIWFFLFFISLP

SEQ ID NO: 29041 - protein, 37 aa, Artificial Sequence
  Quasi-synthetic sequence derived from human genome
VKKLFTIGCPVILATLGVALLFIVRKKRKEKRLKRLR

SEQ ID NO: 29042 - protein, 37 aa, Artificial Sequence
  Quasi-synthetic sequence derived from human genome
WWSGFLLCAIAMFLVIFPMFTFPKKLPPRHKKKKKKK

SEQ ID NO: 29043 - protein, 37 aa, Artificial Sequence
  Quasi-synthetic sequence derived from human genome
LQRCLRGFFIKRRFRSLRHKIILLQSRARGYLARQRY

SEQ ID NO: 29044 - protein, 37 aa, Artificial Sequence
  Quasi-synthetic sequence derived from human genome
LLRKRWFQLGRSMNPRARKKRSRIPLLRKRRFQLGRS

SEQ ID NO: 29045 - protein, 37 aa, Artificial Sequence
  Quasi-synthetic sequence derived from human genome
LIQRRFRTLMMRRRFLSLKKTAILIQRKYRAHLCTKH

SEQ ID NO: 29046 - protein, 37 aa, Artificial Sequence
  Quasi-synthetic sequence derived from human genome
LVTLLIWVPVKVILHKKRYIYRKIKGWRPVLMMCVVL

SEQ ID NO: 29047 - protein, 37 aa, Artificial Sequence
  Quasi-synthetic sequence derived from human genome
LFVYLNRKIVQVMRKQKTINRFLMRKRLLFPALVTLL

SEQ ID NO: 29048 - protein, 37 aa, Artificial Sequence
  Quasi-synthetic sequence derived from human genome
LLPLRMPLSRWQRRLRRAARRQVLSGHLPFCRFRLRY

SEQ ID NO: 29049 - protein, 37 aa, Artificial Sequence
  Quasi-synthetic sequence derived from human genome
KLRAACIRIQKTIRGWLLRKKYLRMRKAAITMQRYVR

SEQ ID NO: 29050 - protein, 37 aa, Artificial Sequence
  Quasi-synthetic sequence derived from human genome
KKKKKRYLRASSNRNFLLTMRPFLKRAILVLSYVLVI

SEQ ID NO: 29051 - protein, 37 aa, Artificial Sequence
  Quasi-synthetic sequence derived from human genome
RNIGIWFFWIRLYKIRRGRTRPQALLFLCMILLLIVL

SEQ ID NO: 29052 - protein, 37 aa, Artificial Sequence
  Quasi-synthetic sequence derived from human genome
RLGLLGRRGFSGRLGGYWKTWIFWKTWIFWKTWIFRK

SEQ ID NO: 29053 - protein, 37 aa, Artificial Sequence
  Quasi-synthetic sequence derived from human genome
IRLKNIRKVYGRCMWYRLRLLKPQPNIIPTVKKIVLL

SEQ ID NO: 29054 - protein, 37 aa, Artificial Sequence
  Quasi-synthetic sequence derived from human genome
RKKIHRRVLKKNPLKNLRIMLKLNPYAKTMRRNTILR

SEQ ID NO: 29055 - protein, 37 aa, Artificial Sequence
  Quasi-synthetic sequence derived from human genome
LRRVTRNLVRNKLAVITRLLQNLIMGLFLLFFVLRVR

SEQ ID NO: 29056 - protein, 37 aa, Artificial Sequence
  Quasi-synthetic sequence derived from human genome
LKKKRRNFAELKIKRLRKKFAQKMLRKARRKLIYEKA

SEQ ID NO: 29057 - protein, 37 aa, Artificial Sequence
  Quasi-synthetic sequence derived from human genome
IPLLRKRRFQLGRSMNLRARKNRSQIVLFQKRRFQFF

SEQ ID NO: 29058 - protein, 37 aa, Artificial Sequence
  Quasi-synthetic sequence derived from human genome
HRLLKRLLGPKLRRFLKPQGHPRLLLWFKRDPRPWSK

SEQ ID NO: 29059 - protein, 37 aa, Artificial Sequence
  Quasi-synthetic sequence derived from human genome
KLLKKRSKQPLGEVKRRLSLYLTKIHFWLPVLKMIRK

SEQ ID NO: 29060 - protein, 37 aa, Artificial Sequence
  Quasi-synthetic sequence derived from human genome
RKRMGLKMLMMMALLVPLVYTIKRHKWSVLKSRKLAY

SEQ ID NO: 29061 - protein, 37 aa, Artificial Sequence
  Quasi-synthetic sequence derived from human genome
LRAQMLIRIVLFLQKVWRGTLARMRYKRTKAALTIIR

SEQ ID NO: 29062 - protein, 37 aa, Artificial Sequence
  Quasi-synthetic sequence derived from human genome
RLRRVIAAFYFPKREKKRILFLYNDLLKKRAAFTKLR

SEQ ID NO: 29063 - protein, 37 aa, Artificial Sequence
  Quasi-synthetic sequence derived from human genome
LLRKRRFQLYRSMNPRARKNRSHIPLVRKRRFQLRRC

SEQ ID NO: 29064 - protein, 37 aa, Artificial Sequence
  Quasi-synthetic sequence derived from human genome
RAARPPLLLRPVKLLRRRFRLLLALAVVSVGLWTLYL

SEQ ID NO: 29065 - protein, 37 aa, Artificial Sequence
  Quasi-synthetic sequence derived from human genome
LVRLLRLIILIRIFHLLHQKRQLEKLMRRLVSENKRR

SEQ ID NO: 29066 - protein, 37 aa, Artificial Sequence
  Quasi-synthetic sequence derived from human genome
VLRRIILLQRWFRVLLCRQHFLHLRQASVIIQRFWRN

SEQ ID NO: 29067 - protein, 37 aa, Artificial Sequence
  Quasi-synthetic sequence derived from human genome
KIFKCYFKHTLQQKVFILFLTLWLLSLLKLLNVRRLF

SEQ ID NO: 29068 - protein, 37 aa, Artificial Sequence
  Quasi-synthetic sequence derived from human genome
RRWRRWNRFNRRRCRAAVKSVTFYWLVIVLVFLNTLT

SEQ ID NO: 29069 - protein, 37 aa, Artificial Sequence
  Quasi-synthetic sequence derived from human genome
PLLPLLLRLLLSCLLLPAARLARQYLLPLLRRLARRL

SEQ ID NO: 29070 - protein, 37 aa, Artificial Sequence
  Quasi-synthetic sequence derived from human genome
LPLRKLKFSPIKYGYQPRRNFWPARLATRLLKLRYLI

SEQ ID NO: 29071 - protein, 37 aa, Artificial Sequence
  Quasi-synthetic sequence derived from human genome
KLLVHSLNLLAKQGLRLLRGLRRRNVQKKVALAKKLL

SEQ ID NO: 29072 - protein, 37 aa, Artificial Sequence
  Quasi-synthetic sequence derived from human genome
KYFVSPTLFRVIRLARIGRVLRLIRGAKGIRTLLFAL

SEQ ID NO: 29073 - protein, 37 aa, Artificial Sequence
  Quasi-synthetic sequence derived from human genome
VLVLLVSLGVAIHLCCRRRRARLRFMKQKFNIVCLKI

SEQ ID NO: 29074 - protein, 37 aa, Artificial Sequence
  Quasi-synthetic sequence derived from human genome
RKGKRKTVKAVIDRFLRLHCGLWVRRKAGYKKKLWKK

SEQ ID NO: 29075 - protein, 37 aa, Artificial Sequence
  Quasi-synthetic sequence derived from human genome
KLTCSAFRLQRALRFLLGRLPWRVASGARRFRRWLNR

SEQ ID NO: 29076 - protein, 37 aa, Artificial Sequence
  Quasi-synthetic sequence derived from human genome
RIPLLRKRRFQLYRSTNPRARKNRSRIPLLRKHRFQL

SEQ ID NO: 29077 - protein, 37 aa, Artificial Sequence
  Quasi-synthetic sequence derived from human genome
IPLLRKRRFQLYRSMNSRARKNRSQIVLFQKRRFHFF

SEQ ID NO: 29078 - protein, 37 aa, Artificial Sequence
  Quasi-synthetic sequence derived from human genome
IPLLRKRRFQLCRCMNPRARKNRSQIVLFQKLRFQFF

SEQ ID NO: 29079 - protein, 37 aa, Artificial Sequence
  Quasi-synthetic sequence derived from human genome
VIRGGATRAAGVFYPWRFRLLCLLRRWLPRPRAWFIR

SEQ ID NO: 29080 - protein, 37 aa, Artificial Sequence
  Quasi-synthetic sequence derived from human genome
LRRKKKKTIKMLMLVVVLFALCWFPLNCYVLLLSSKV

SEQ ID NO: 29081 - protein, 37 aa, Artificial Sequence
  Quasi-synthetic sequence derived from human genome
LVRRRFISLKKATIFVQRKYRATICAKHKLYQFLHLR

SEQ ID NO: 29082 - protein, 37 aa, Artificial Sequence
  Quasi-synthetic sequence derived from human genome
LPRRRGRPSRRFLGKKYRKYYYKSPKPLLRPFLCRIC

SEQ ID NO: 29083 - protein, 37 aa, Artificial Sequence
  Quasi-synthetic sequence derived from human genome
ALLFLLFFLTLRFSVVKRGRKKLLYIFKQPFMRPVQT

SEQ ID NO: 29084 - protein, 37 aa, Artificial Sequence
  Quasi-synthetic sequence derived from human genome
KYRKLVKKTRFLRRKVQEGRLRRKQIKFEKDLRRIWL

SEQ ID NO: 29085 - protein, 37 aa, Artificial Sequence
  Quasi-synthetic sequence derived from human genome
RRLLLALHRRLRGLRRAAAGTSRLLFQRLLPCGVIKF

SEQ ID NO: 29086 - protein, 37 aa, Artificial Sequence
  Quasi-synthetic sequence derived from human genome
IYIQAIFRGKKARRHLKMMHIAATLIQRRFRTLMMRR

SEQ ID NO: 29087 - protein, 37 aa, Artificial Sequence
  Quasi-synthetic sequence derived from human genome
CLYLIYNLLQAVFFVLFVLSVHYLWKKWKKHQKKLKK

SEQ ID NO: 29088 - protein, 37 aa, Artificial Sequence
  Quasi-synthetic sequence derived from human genome
QKTVKKKIKPTLPLRIFINVSRFFCVQLKKMVRLMYI

SEQ ID NO: 29089 - protein, 37 aa, Artificial Sequence
  Quasi-synthetic sequence derived from human genome
VLVALLAVIVLVALLLLWRRRQKRRTGALVLSRGGKR

SEQ ID NO: 29090 - protein, 37 aa, Artificial Sequence
  Quasi-synthetic sequence derived from human genome
RKLTHLRKRIHRPRRRTTRRWKRWFKFRKRKGEKRPR

SEQ ID NO: 29091 - protein, 37 aa, Artificial Sequence
  Quasi-synthetic sequence derived from human genome
QLGAGLKVLFKKTHRILRRLFNLCKRCHRQPRFRLPK

SEQ ID NO: 29092 - protein, 37 aa, Artificial Sequence
  Quasi-synthetic sequence derived from human genome
RRLRKNLRALVVVHATWYVKAFLALLRPFISSKFTRK

SEQ ID NO: 29093 - protein, 37 aa, Artificial Sequence
  Quasi-synthetic sequence derived from human genome
CWKFFMARVRLQLKIILCFSPVGRTLRVRARKFPAIV

SEQ ID NO: 29094 - protein, 37 aa, Artificial Sequence
  Quasi-synthetic sequence derived from human genome
PYKTMKFILWRRFRWAIILFIILFILLLFLAIFIYAF

SEQ ID NO: 29095 - protein, 37 aa, Artificial Sequence
  Quasi-synthetic sequence derived from human genome
FQRALALFVLTCVVLTFLGHRLLKRLLGPKLRRFLKP

SEQ ID NO: 29096 - protein, 37 aa, Artificial Sequence
  Quasi-synthetic sequence derived from human genome
RRRNTPFHERFFRFLLRKLYVFRRSFLMTCISLRNLI

SEQ ID NO: 29097 - protein, 37 aa, Artificial Sequence
  Quasi-synthetic sequence derived from human genome
KYRRRPALGWLARLLRSRAGSRKRPLTLLQRAGLLLL

SEQ ID NO: 29098 - protein, 37 aa, Artificial Sequence
  Quasi-synthetic sequence derived from human genome
WRRDIFGRIIWHKFKQWVIPWHLNKRYNRKRFFALPY

SEQ ID NO: 29099 - protein, 37 aa, Artificial Sequence
  Quasi-synthetic sequence derived from human genome
FILILGNKKLKQIFLSVLRHVRYWVKDRSLRLHRFTR

SEQ ID NO: 29100 - protein, 37 aa, Artificial Sequence
  Quasi-synthetic sequence derived from human genome
KKLDLWRLPPILIIHLKRFQFVNGRWIKSQKIVKFPR

SEQ ID NO: 29101 - protein, 37 aa, Artificial Sequence
  Quasi-synthetic sequence derived from human genome
KYLKVFYKFINLNRYKIRHTRKKPFKCKNCVKSFCMF

SEQ ID NO: 29102 - protein, 37 aa, Artificial Sequence
  Quasi-synthetic sequence derived from human genome
RWRCRRLRAIYTIMRWFRRHKVRAHLAELQRRFQAAR

SEQ ID NO: 29103 - protein, 37 aa, Artificial Sequence
  Quasi-synthetic sequence derived from human genome
KKIIQKHFEKKKDIRRGIGYLKLICFLIPFLLSLKKK

SEQ ID NO: 29104 - protein, 37 aa, Artificial Sequence
  Quasi-synthetic sequence derived from human genome
LLRKRWFQLGHSMNPRARKNRSRIPLLRKRRFQLYRS

SEQ ID NO: 29105 - protein, 37 aa, Artificial Sequence
  Quasi-synthetic sequence derived from human genome
HSKPMRWPFFLFIPFFIIFCVLIAIMVKVNFQRKKWR

SEQ ID NO: 29106 - protein, 37 aa, Artificial Sequence
  Quasi-synthetic sequence derived from human genome
FAILRIIRLVRVFRIFKLSRHSKGLQILGHTLRASMR

SEQ ID NO: 29107 - protein, 37 aa, Artificial Sequence
  Quasi-synthetic sequence derived from human genome
TRVCRRLRRANRVLRARCRRAVKSNACYWAVLLLVFL

SEQ ID NO: 29108 - protein, 37 aa, Artificial Sequence
  Quasi-synthetic sequence derived from human genome
RSIAIIVPLVLLVTLITTLVIGLVLCKRKRRTKTIRR

SEQ ID NO: 29109 - protein, 37 aa, Artificial Sequence
  Quasi-synthetic sequence derived from human genome
MTILINFLIFIRILGILLSKLRTRQMRCRDYRLRLAR

SEQ ID NO: 29110 - protein, 37 aa, Artificial Sequence
  Quasi-synthetic sequence derived from human genome
KQIRARRKTARMLMIVLLVFAICYLPISILNVLKRVF

SEQ ID NO: 29111 - protein, 37 aa, Artificial Sequence
  Quasi-synthetic sequence derived from human genome
RPLAHLCRLRVRKAIGKYRIKLLDTLPLPGRLIRYLK

SEQ ID NO: 29112 - protein, 37 aa, Artificial Sequence
  Quasi-synthetic sequence derived from human genome
QLRRQMWWRGCKIKAIMALVAAILLLVIIILIVMKYR

SEQ ID NO: 29113 - protein, 37 aa, Artificial Sequence
  Quasi-synthetic sequence derived from human genome
SRVSVRTWWRWLTFWRRLQSAFLKNRSLRTKSSLWRR

SEQ ID NO: 29114 - protein, 37 aa, Artificial Sequence
  Quasi-synthetic sequence derived from human genome
RAMLYSRAVRNLKKKLLPWQRRGLLRAQGLRGWKARR

SEQ ID NO: 29115 - protein, 37 aa, Artificial Sequence
  Quasi-synthetic sequence derived from human genome
TLIILAVVGGVIGLLILILLIKKLIIFILKKTREKKK

SEQ ID NO: 29116 - protein, 37 aa, Artificial Sequence
  Quasi-synthetic sequence derived from human genome
KRMRVKKLPMILALHLKRFKYMEQLHRYTKLSYRVVF

SEQ ID NO: 29117 - protein, 37 aa, Artificial Sequence
  Quasi-synthetic sequence derived from human genome
KIKTFLSLVWKRRILFFVVTLVSVFLVWKFTYAHKYL

SEQ ID NO: 29118 - protein, 37 aa, Artificial Sequence
  Quasi-synthetic sequence derived from human genome
RRLQARRFRRSRRTGRLVVLIILTFAAFWLPYHVVNL

SEQ ID NO: 29119 - protein, 37 aa, Artificial Sequence
  Quasi-synthetic sequence derived from human genome
LCRLKIRKCMGRLHLRCPVFMSFLPLPNRLKAYVLYK

SEQ ID NO: 29120 - protein, 37 aa, Artificial Sequence
  Quasi-synthetic sequence derived from human genome
FKLLILLIGTWALFFRKRRADMPRVFVFRALLLVLIF

SEQ ID NO: 29121 - protein, 37 aa, Artificial Sequence
  Quasi-synthetic sequence derived from human genome
QKKPLIFLGCCFFSTLVLLLSIAIFQRQKRRKFWKAK

SEQ ID NO: 29122 - protein, 37 aa, Artificial Sequence
  Quasi-synthetic sequence derived from human genome
RRSQRASFKRARRPGARALRLVLGIVLLFWACFLPFW

SEQ ID NO: 29123 - protein, 37 aa, Artificial Sequence
  Quasi-synthetic sequence derived from human genome
KKKKKSGTKKDVPKSWLMKALFKTFYMVLLKSFLLKL

SEQ ID NO: 29124 - protein, 37 aa, Artificial Sequence
  Quasi-synthetic sequence derived from human genome
RKYKKNIKALYIVHPTMFIKTLLILFKPLISFKFGQK

SEQ ID NO: 29125 - protein, 37 aa, Artificial Sequence
  Quasi-synthetic sequence derived from human genome
KRMKVKKLPMILALHLKRFKYMDQLHRYTKLSYRVVF

SEQ ID NO: 29126 - protein, 37 aa, Artificial Sequence
  Quasi-synthetic sequence derived from human genome
FKLLILLLGSWALFFRRPKASLPRVFVLRALLMVLVF

SEQ ID NO: 29127 - protein, 37 aa, Artificial Sequence
  Quasi-synthetic sequence derived from human genome
RRRPARTLGLLLLVVLGFLVLRRLDWSTLVPLRLRHR

SEQ ID NO: 29128 - protein, 37 aa, Artificial Sequence
  Quasi-synthetic sequence derived from human genome
LLRRRFLHLKKAAIVFQKQLRGQIARRVYRQLLAEKR

SEQ ID NO: 29129 - protein, 37 aa, Artificial Sequence
  Quasi-synthetic sequence derived from human genome
VYSSIVSFYVPFIVTLLVYIKIYIVLRRRRKRVNTKR

SEQ ID NO: 29130 - protein, 37 aa, Artificial Sequence
  Quasi-synthetic sequence derived from human genome
RVAARVQRRPWGAWLSARLWKWLKSPRSWRLGLALLL

SEQ ID NO: 29131 - protein, 37 aa, Artificial Sequence
  Quasi-synthetic sequence derived from human genome
ATGMVGALLLLLVVALGIGLFMRRRHIVRKRTLRRLL

SEQ ID NO: 29132 - protein, 37 aa, Artificial Sequence
  Quasi-synthetic sequence derived from human genome
LAILRIIRLVRVFRIFKLSRHSKGLQILGQTLKASMR

SEQ ID NO: 29133 - protein, 37 aa, Artificial Sequence
  Quasi-synthetic sequence derived from human genome
PFCLKLLLPGLLLLLVVIILILAFWVLPKYKTRKAMR

SEQ ID NO: 29134 - protein, 37 aa, Artificial Sequence
  Quasi-synthetic sequence derived from human genome
RRRGFGLFFFLRLHRLLLLFLVLRGTLANKLNVPQVL

SEQ ID NO: 29135 - protein, 37 aa, Artificial Sequence
  Quasi-synthetic sequence derived from human genome
CKKKQKSTKKFWIQKLPKVLCLHLKRFHWTAYLRNKV

SEQ ID NO: 29136 - protein, 37 aa, Artificial Sequence
  Quasi-synthetic sequence derived from human genome
KLLRHLVPAAALRRKRKALWAHLFSSLRGYLKSLPRV

SEQ ID NO: 29137 - protein, 37 aa, Artificial Sequence
  Quasi-synthetic sequence derived from human genome
RRKMSKKLPPVIIKYIIINRFRGRKNMLVKLGKIDSK

SEQ ID NO: 29138 - protein, 37 aa, Artificial Sequence
  Quasi-synthetic sequence derived from human genome
VVKILRVLRVLRPLRAINRAKGLKHVVQCVFVAIRTI

SEQ ID NO: 29139 - protein, 37 aa, Artificial Sequence
  Quasi-synthetic sequence derived from human genome
AAGVIGGLFILVIVGLTFAVYVRRKSIKKKRALRRFL

SEQ ID NO: 29140 - protein, 37 aa, Artificial Sequence
  Quasi-synthetic sequence derived from human genome
PKLSKFILISSLAILLMVSLLLLSLWKLWRVKKFLIP

SEQ ID NO: 29141 - protein, 37 aa, Artificial Sequence
  Quasi-synthetic sequence derived from human genome
WRGFHWRQKFLRVKRSAICIQSWWRGTLGRRKAAKRK

SEQ ID NO: 29142 - protein, 37 aa, Artificial Sequence
  Quasi-synthetic sequence derived from human genome
LLRLLGLRRGLRRLRRLWAGPRVQRGRGRGRGRGWGP

SEQ ID NO: 29143 - protein, 37 aa, Artificial Sequence
  Quasi-synthetic sequence derived from human genome
LYGFIFYLLASVLLSLLLILKAGRRWNKYFKSRRPLF

SEQ ID NO: 29144 - protein, 37 aa, Artificial Sequence
  Quasi-synthetic sequence derived from human genome
RLLRLIILIRIFHLLHQKRQLEKLMRRLVSENKRRYT

SEQ ID NO: 29145 - protein, 37 aa, Artificial Sequence
  Quasi-synthetic sequence derived from human genome
RRSLRPCSVLVSLLQKPRHRCRKRKPLLAIGFYLYRM

SEQ ID NO: 29146 - protein, 37 aa, Artificial Sequence
  Quasi-synthetic sequence derived from human genome
RCYRLAVRTVIRAFVKCTKARYLKKKNMRTLWINRIT

SEQ ID NO: 29147 - protein, 37 aa, Artificial Sequence
  Quasi-synthetic sequence derived from human genome
CIPVFRLARRRKKILFYCHFPDLLLTKRDSFLKRLYR

SEQ ID NO: 29148 - protein, 37 aa, Artificial Sequence
  Quasi-synthetic sequence derived from human genome
WRRYSTRQRFLKLKYYSIILQSRIRMIIAVTSYKRYL

SEQ ID NO: 29149 - protein, 37 aa, Artificial Sequence
  Quasi-synthetic sequence derived from human genome
RRPSPYWRLTWRVVSPLLLTIFVAYIILLFWKPLRYK

SEQ ID NO: 29150 - protein, 37 aa, Artificial Sequence
  Quasi-synthetic sequence derived from human genome
RKAPLWLRAKFQRLLFKLGCYIQKNCGKFLVVGLLIF

SEQ ID NO: 29151 - protein, 37 aa, Artificial Sequence
  Quasi-synthetic sequence derived from human genome
RIPLLRKHRFQLYRSMNSRARKNRSQIVLFQKRRFHF

SEQ ID NO: 29152 - protein, 37 aa, Artificial Sequence
  Quasi-synthetic sequence derived from human genome
FRNLRLPKRLRVVYFLARTRLAQRLIMAGTVVWIGIL

SEQ ID NO: 29153 - protein, 37 aa, Artificial Sequence
  Quasi-synthetic sequence derived from human genome
KLLSVFRQPLSSLWRSLVPLFCWLRATFWLLATKRRK

SEQ ID NO: 29154 - protein, 37 aa, Artificial Sequence
  Quasi-synthetic sequence derived from human genome
RLRHLRRPRVARLLCLGVWALILVFAVPAARVHRPSR

SEQ ID NO: 29155 - protein, 37 aa, Artificial Sequence
  Quasi-synthetic sequence derived from human genome
DRVVKIAGISAGILVFILLLLVVILIVKKSKLAKKRK

SEQ ID NO: 29156 - protein, 37 aa, Artificial Sequence
  Quasi-synthetic sequence derived from human genome
LLVAGVLVLLVSLGVAIHLCCRRRRARLRFMKQLRLH

SEQ ID NO: 29157 - protein, 37 aa, Artificial Sequence
  Quasi-synthetic sequence derived from human genome
ARDVLGFLRVVRFVRILRIFKLTRHFVGLRVLGHTLR

SEQ ID NO: 29158 - protein, 37 aa, Artificial Sequence
  Quasi-synthetic sequence derived from human genome
IKTIKSLRVLRVLRPLKTIKRLPKLKAVFDCVVTSLK

SEQ ID NO: 29159 - protein, 37 aa, Artificial Sequence
  Quasi-synthetic sequence derived from human genome
RRKLKFFFMNPCEKFWARGRKPWKLAIQILKIAMVTI

SEQ ID NO: 29160 - protein, 37 aa, Artificial Sequence
  Quasi-synthetic sequence derived from human genome
LRRNKAALLFWHILLLGPIVRCLHTIRNYHKWLKNLK

SEQ ID NO: 29161 - protein, 37 aa, Artificial Sequence
  Quasi-synthetic sequence derived from human genome
RIRYEFKAKNIKKKKVSIMVSVDGVKVILKKKKKLLL

SEQ ID NO: 29162 - protein, 37 aa, Artificial Sequence
  Quasi-synthetic sequence derived from human genome
DVIAFLLACVATVIFIITKFCLFCFRKLAKKGKKKKR

SEQ ID NO: 29163 - protein, 37 aa, Artificial Sequence
  Quasi-synthetic sequence derived from human genome
FFMPLGIILFCSFKIVWSLRRRQQLARQARMKKATRF

SEQ ID NO: 29164 - protein, 37 aa, Artificial Sequence
  Quasi-synthetic sequence derived from human genome
VLGFLRVVRFVRILRIFKLTRHFVGLRVLGHTLRAST

SEQ ID NO: 29165 - protein, 37 aa, Artificial Sequence
  Quasi-synthetic sequence derived from human genome
RIIWHKFKQWVIPWHLNKRYNRKRFFALPYVDHFLRL

SEQ ID NO: 29166 - protein, 37 aa, Artificial Sequence
  Quasi-synthetic sequence derived from human genome
LVPPLMNPIIYSIKTKQIRQRIIKKFQFIKSLRCFWK

SEQ ID NO: 29167 - protein, 37 aa, Artificial Sequence
  Quasi-synthetic sequence derived from human genome
KRRKSNPKPLVLSEARKQLMIYRLPQVLRLHLKRFRW

SEQ ID NO: 29168 - protein, 37 aa, Artificial Sequence
  Quasi-synthetic sequence derived from human genome
RLSRALLTAVTNVLIFFWCLAFLWGLLILLKYRWRKL

SEQ ID NO: 29169 - protein, 37 aa, Artificial Sequence
  Quasi-synthetic sequence derived from human genome
FLTALLWRGRIPGRQWIGKHRRPRFVSLRAKQNMIRR

SEQ ID NO: 29170 - protein, 37 aa, Artificial Sequence
  Quasi-synthetic sequence derived from human genome
KKHLILAFCAGVLLTLLLIAFIFLIIKSYRKYRRERL

SEQ ID NO: 29171 - protein, 37 aa, Artificial Sequence
  Quasi-synthetic sequence derived from human genome
AILKSLQSYFSPTLFRVIRLARIGRILRLIRAAKGIR

SEQ ID NO: 29172 - protein, 37 aa, Artificial Sequence
  Quasi-synthetic sequence derived from human genome
KKIRKQMKLLLLLLLLSCAAWLTYVHLGLVRQGRALR

SEQ ID NO: 29173 - protein, 37 aa, Artificial Sequence
  Quasi-synthetic sequence derived from human genome
FINLSFLRLFRAARLIKLLRQGYTIRILLWTFVQSFK

SEQ ID NO: 29174 - protein, 37 aa, Artificial Sequence
  Quasi-synthetic sequence derived from human genome
LAILRVIRLVRVFRIFKLSRHSKGLQILGKTLQASMR

SEQ ID NO: 29175 - protein, 37 aa, Artificial Sequence
  Quasi-synthetic sequence derived from human genome
LAILRVIRLVRVFRIFKLSRHSKGLQILGQTLKASMR

SEQ ID NO: 29176 - protein, 37 aa, Artificial Sequence
  Quasi-synthetic sequence derived from human genome
WRILKVLLWLLAILTGLIAGKFLFHQRLFGQLLRLKM

SEQ ID NO: 29177 - protein, 37 aa, Artificial Sequence
  Quasi-synthetic sequence derived from human genome
KLLKRLRLLPALLILRAFKPHRKIRDYRVVVVGTAGV

SEQ ID NO: 29178 - protein, 37 aa, Artificial Sequence
  Quasi-synthetic sequence derived from human genome
KLKLFRHYYVLIVCYIYFTRIIAFLLKLAVPFQWKWL

SEQ ID NO: 29179 - protein, 37 aa, Artificial Sequence
  Quasi-synthetic sequence derived from human genome
PRPPGARTRAGAARVARWRRLRLQQLRRLRGLLRVLR

SEQ ID NO: 29180 - protein, 37 aa, Artificial Sequence
  Quasi-synthetic sequence derived from human genome
RWLRIKLWISTVALALVPFLLLIPKFARWFSVPWKVI

SEQ ID NO: 29181 - protein, 37 aa, Artificial Sequence
  Quasi-synthetic sequence derived from human genome
ALFCLQYLGVRVLLRFQRKLSVLLLLLGRRRVDFRLV

SEQ ID NO: 29182 - protein, 37 aa, Artificial Sequence
  Quasi-synthetic sequence derived from human genome
FWCRFRRAFVTVTHRLLLLCLGVVMVCVVLRYMKYRW

SEQ ID NO: 29183 - protein, 37 aa, Artificial Sequence
  Quasi-synthetic sequence derived from human genome
LVIFVLVHSFLKKLLGKKLTRCLKPFENSRLRLWTKW

SEQ ID NO: 29184 - protein, 37 aa, Artificial Sequence
  Quasi-synthetic sequence derived from human genome
CLLLWVKQRKDLLHLCCKKLKILGMPFRNIRSILKMV

SEQ ID NO: 29185 - protein, 37 aa, Artificial Sequence
  Quasi-synthetic sequence derived from human genome
IQLLLWKNWTLRKRQKIRFVVELVWPLSLFLVLIWLR

SEQ ID NO: 29186 - protein, 37 aa, Artificial Sequence
  Quasi-synthetic sequence derived from human genome
YLKRFKVMKPKVLRSWCRQILKGLQFLHTRTPPIIHR

SEQ ID NO: 29187 - protein, 37 aa, Artificial Sequence
  Quasi-synthetic sequence derived from human genome
TLVLIVLVTLIFCLIVLSLSTFHIHKRRMKKRKMQRA

SEQ ID NO: 29188 - protein, 37 aa, Artificial Sequence
  Quasi-synthetic sequence derived from human genome
KRRPKRREIPLKVLVKAVLFACMLMRKTMASRVRVTI

SEQ ID NO: 29189 - protein, 37 aa, Artificial Sequence
  Quasi-synthetic sequence derived from human genome
MFWLIFLLIILSYIKIGKNLLRISKRRSKFPNSGKYA

SEQ ID NO: 29190 - protein, 37 aa, Artificial Sequence
  Quasi-synthetic sequence derived from human genome
RRMRILRRLLRRYRESKKIDRHMYHSLYLKVKGNVFK

SEQ ID NO: 29191 - protein, 37 aa, Artificial Sequence
  Quasi-synthetic sequence derived from human genome
WLKVFYCLRIANFNHPLFFLMKRKIIVLMPWLLRLSV

SEQ ID NO: 29192 - protein, 37 aa, Artificial Sequence
  Quasi-synthetic sequence derived from human genome
FLLKRFNKEKLGLLLLTFLGIVAAVLVKKYQAVLRRK

SEQ ID NO: 29193 - protein, 37 aa, Artificial Sequence
  Quasi-synthetic sequence derived from human genome
ALWRRQIYAVATLRFLKLRRERRALLCLLLVLGIAFI

SEQ ID NO: 29194 - protein, 37 aa, Artificial Sequence
  Quasi-synthetic sequence derived from human genome
IWVKMYGYFAGLCRRLQKFWRVTVKGFFVKKKEKKIP

SEQ ID NO: 29195 - protein, 37 aa, Artificial Sequence
  Quasi-synthetic sequence derived from human genome
RGYQARCYAKFLRRTKAATIIQKYWRMYVVRRRYKIR

SEQ ID NO: 29196 - protein, 37 aa, Artificial Sequence
  Quasi-synthetic sequence derived from human genome
WLRRGVLLVRAPPACLQVLRDAWRRRALRPPRGFRIR

SEQ ID NO: 29197 - protein, 37 aa, Artificial Sequence
  Quasi-synthetic sequence derived from human genome
FKLFTLVSACIPVFRLARRRKKILFYCHFPDLLLTKR

SEQ ID NO: 29198 - protein, 37 aa, Artificial Sequence
  Quasi-synthetic sequence derived from human genome
LFLILLATAVILGSAVLLFHFCIFHRRKMKAIRRSLK

SEQ ID NO: 29199 - protein, 37 aa, Artificial Sequence
  Quasi-synthetic sequence derived from human genome
KSAPILKRALKVKQAMLQLYVLKLLKLQTKYLGRQWR

SEQ ID NO: 29200 - protein, 37 aa, Artificial Sequence
  Quasi-synthetic sequence derived from human genome
YIINKDILRRVLVLMASKHAFLALCALRFKRKIIGLK

SEQ ID NO: 29201 - protein, 37 aa, Artificial Sequence
  Quasi-synthetic sequence derived from human genome
YLGLTMVGKIKRLKKSAFVVLILLITAKLLVLPLLCR

SEQ ID NO: 29202 - protein, 37 aa, Artificial Sequence
  Quasi-synthetic sequence derived from human genome
LLRKPWFQLGHSMNPRARKNRSRIPLLRKRRFQLYRS

SEQ ID NO: 29203 - protein, 37 aa, Artificial Sequence
  Quasi-synthetic sequence derived from human genome
KYLKVFYKFLNSNRPKIRHTEKKSFKCKKRVKLFCML

SEQ ID NO: 29204 - protein, 37 aa, Artificial Sequence
  Quasi-synthetic sequence derived from human genome
RLPIRMAKALGKRTAKYRWFAVLYLLVCFLLLPSLVF

SEQ ID NO: 29205 - protein, 37 aa, Artificial Sequence
  Quasi-synthetic sequence derived from human genome
ILFMFRRLRQFRQAQPTPQYRFRKRDKVMFYGRKIMR

SEQ ID NO: 29206 - protein, 37 aa, Artificial Sequence
  Quasi-synthetic sequence derived from human genome
LAFKNDISFWKKKKSMIGMSTKLWKVKKALKMTIFWR

SEQ ID NO: 29207 - protein, 37 aa, Artificial Sequence
  Quasi-synthetic sequence derived from human genome
KLSMIRFRYRILRSQHFRTKSKVCKLRKAQRSWVQKV

SEQ ID NO: 29208 - protein, 37 aa, Artificial Sequence
  Quasi-synthetic sequence derived from human genome
KQMRARRKTAKMLMVVLLVFALCYLPISVLNVLKRVF

SEQ ID NO: 29209 - protein, 37 aa, Artificial Sequence
  Quasi-synthetic sequence derived from human genome
FVPQMPFVPAVAKSIPRKRISLKRPKKCFRNLFHIRR

SEQ ID NO: 29210 - protein, 37 aa, Artificial Sequence
  Quasi-synthetic sequence derived from human genome
LRGFLARNRYRKILREHKAVIIQKRVRGWLARTHYKR

SEQ ID NO: 29211 - protein, 37 aa, Artificial Sequence
  Quasi-synthetic sequence derived from human genome
TFRVFRALKAISVVSRLKVIVGALLRSVKKLVNVIIL

SEQ ID NO: 29212 - protein, 37 aa, Artificial Sequence
  Quasi-synthetic sequence derived from human genome
MVVVMKFFRWVRRAWQRIISWVFFWRQKIKPTISGHP

SEQ ID NO: 29213 - protein, 37 aa, Artificial Sequence
  Quasi-synthetic sequence derived from human genome
ALRPLVKPKIVKKRTKKFIRHQSDRYVKIKRNWRKPR

SEQ ID NO: 29214 - protein, 37 aa, Artificial Sequence
  Quasi-synthetic sequence derived from human genome
NLIILVNLIHLFIFRKSNFIFDKLHKVGIKTRRQWRR

SEQ ID NO: 29215 - protein, 37 aa, Artificial Sequence
  Quasi-synthetic sequence derived from human genome
KKYPQPKGQKKKKIVKYGMGGLIILFLIAIIWFPLLF

SEQ ID NO: 29216 - protein, 37 aa, Artificial Sequence
  Quasi-synthetic sequence derived from human genome
GRPSRRFLGKKYRKYYYKSPKPLLRPFLCRICGSRFL

SEQ ID NO: 29217 - protein, 37 aa, Artificial Sequence
  Quasi-synthetic sequence derived from human genome
FHFLVPMIIVIFCYLRIWILVLQVRQRVKPDRKPKLK

SEQ ID NO: 29218 - protein, 37 aa, Artificial Sequence
  Quasi-synthetic sequence derived from human genome
IFFAFVLLLSGALAYCLALQLYVRRRKKLPSVLLFKK

SEQ ID NO: 29219 - protein, 37 aa, Artificial Sequence
  Quasi-synthetic sequence derived from human genome
RVILAPWKKGLIAVVIIGVIIALLIIAAKCYFLRKAK

SEQ ID NO: 29220 - protein, 37 aa, Artificial Sequence
  Quasi-synthetic sequence derived from human genome
LRRRLKYFFMSPCDKFRAKGRKPCKLMLQVVKILVVT

SEQ ID NO: 29221 - protein, 37 aa, Artificial Sequence
  Quasi-synthetic sequence derived from human genome
LLLRFLRLCRSFYITCRRLRCFPQPPRRNWLLGHLGM

SEQ ID NO: 29222 - protein, 37 aa, Artificial Sequence
  Quasi-synthetic sequence derived from human genome
PLSVLILGLLIMFITIVFCAAGIVVLVLHRRRRYKKK

SEQ ID NO: 29223 - protein, 37 aa, Artificial Sequence
  Quasi-synthetic sequence derived from human genome
LNVMGKLRYLSLLCLLPLVAFLLFCLHVLFKKRTKSK

SEQ ID NO: 29224 - protein, 37 aa, Artificial Sequence
  Quasi-synthetic sequence derived from human genome
VLRGNTKINTFNWAKIRKLSFKRKHFLIKLHANILVL

SEQ ID NO: 29225 - protein, 37 aa, Artificial Sequence
  Quasi-synthetic sequence derived from human genome
VLVKRKRTKGKKLLLSIGVLLHKWKNVCIVLTALNFP

SEQ ID NO: 29226 - protein, 37 aa, Artificial Sequence
  Quasi-synthetic sequence derived from human genome
RKLHQQYRLARQRIIQFQARCRAYLVRKAFRHRLWAV

SEQ ID NO: 29227 - protein, 37 aa, Artificial Sequence
  Quasi-synthetic sequence derived from human genome
RRRYRKMLEEHKAVILQKYARAWLARRRFQSIRRFVL

SEQ ID NO: 29228 - protein, 37 aa, Artificial Sequence
  Quasi-synthetic sequence derived from human genome
RVRFLNLKKTIIKFQAHVRKHQQRQKYKKMKKAAVII

SEQ ID NO: 29229 - protein, 37 aa, Artificial Sequence
  Quasi-synthetic sequence derived from human genome
PKAKQRLKRLRNIHYLFNTALFLIAWRLLIARSQMAR

SEQ ID NO: 29230 - protein, 37 aa, Artificial Sequence
  Quasi-synthetic sequence derived from human genome
RRRRRLRRRPRGLRCSRLPPPPPLPLLLGLLLAAAGP

SEQ ID NO: 29231 - protein, 37 aa, Artificial Sequence
  Quasi-synthetic sequence derived from human genome
PWALIAIAIVAVLLVLTCCFCICKKCLFKKKNKKKGK

SEQ ID NO: 29232 - protein, 37 aa, Artificial Sequence
  Quasi-synthetic sequence derived from human genome
RAFLRLLRCQCRRRRRRRPLWRVYGHHWRASTSGLRQ

SEQ ID NO: 29233 - protein, 37 aa, Artificial Sequence
  Quasi-synthetic sequence derived from human genome
LIPFLIIVGICLILIVIFMITKFVQDRHRARRNRLRK

SEQ ID NO: 29234 - protein, 37 aa, Artificial Sequence
  Quasi-synthetic sequence derived from human genome
FHRWKVVLLVRTDKRSDSLIRKKFRMMKIPKPILFGL

SEQ ID NO: 29235 - protein, 37 aa, Artificial Sequence
  Quasi-synthetic sequence derived from human genome
WLAIILLIFISLFPEILLIVLKNVRRRSARRNLSCRR

SEQ ID NO: 29236 - protein, 37 aa, Artificial Sequence
  Quasi-synthetic sequence derived from human genome
RKYKKNLKALYVVHPTSFIKVLWNILKPLISHKFGKK

SEQ ID NO: 29237 - protein, 37 aa, Artificial Sequence
  Quasi-synthetic sequence derived from human genome
HRVRVLSVARPGLWLYTHPLIKLLFLPRRSRCKFFSL

SEQ ID NO: 29238 - protein, 37 aa, Artificial Sequence
  Quasi-synthetic sequence derived from human genome
VFPRFIKIIEVKNKKLVELLRRKVRLAQPYVGVFLKR

SEQ ID NO: 29239 - protein, 37 aa, Artificial Sequence
  Quasi-synthetic sequence derived from human genome
IAFWARRASRTRLAAWARRALLSLRSPKARRGKARRR

SEQ ID NO: 29240 - protein, 37 aa, Artificial Sequence
  Quasi-synthetic sequence derived from human genome
TLKAAVIVAFAFTTLLIACLLLRVFRSGKRLKKTRKY

SEQ ID NO: 29241 - protein, 37 aa, Artificial Sequence
  Quasi-synthetic sequence derived from human genome
FLKLFRAARLIKLLRQGYTIRILLWTFVQSFKALPYV

SEQ ID NO: 29242 - protein, 37 aa, Artificial Sequence
  Quasi-synthetic sequence derived from human genome
PLIPKKFQLNQHRRIKLSPLMMYEKLSMIRFRYRILR

SEQ ID NO: 29243 - protein, 37 aa, Artificial Sequence
  Quasi-synthetic sequence derived from human genome
LLFARGAPAWLRRRYLRLRYEDLVRQPRAQLRRLLRF

SEQ ID NO: 29244 - protein, 37 aa, Artificial Sequence
  Quasi-synthetic sequence derived from human genome
RIKYIEFKKSTVILQALVRGWLVRKRFLEQRAKIRLL

SEQ ID NO: 29245 - protein, 37 aa, Artificial Sequence
  Quasi-synthetic sequence derived from human genome
MARRGWRRAPLRRGVGSSPRARRLMRPLWLLLAVGVF

SEQ ID NO: 29246 - protein, 37 aa, Artificial Sequence
  Quasi-synthetic sequence derived from human genome
TIYSTFGAFYIPLLLMLVLYGRIFRAARFRIRKTVKK

SEQ ID NO: 29247 - protein, 37 aa, Artificial Sequence
  Quasi-synthetic sequence derived from human genome
IIILVLCLRLLQSRCPRVLPKKLQNWNFLPLWMRSLK

SEQ ID NO: 29248 - protein, 37 aa, Artificial Sequence
  Quasi-synthetic sequence derived from human genome
FRYLQRLLLVHGRWSYIRMCKFLRYFFYKNFAFTLVH

SEQ ID NO: 29249 - protein, 37 aa, Artificial Sequence
  Quasi-synthetic sequence derived from human genome
IAAFLPARQLWKWFGKPTQRRGMKGKARKLFYKAIVR

SEQ ID NO: 29250 - protein, 37 aa, Artificial Sequence
  Quasi-synthetic sequence derived from human genome
LIEKYFVSPTLFRVIRLARIGRILRLIKGAKGIRTLL

SEQ ID NO: 29251 - protein, 37 aa, Artificial Sequence
  Quasi-synthetic sequence derived from human genome
IEKYFVSPTLFRVIRLARIGRILRLIKGAKGIRTLLF

SEQ ID NO: 29252 - protein, 37 aa, Artificial Sequence
  Quasi-synthetic sequence derived from human genome
LTRSFYVILGFCGLTALYFLIRAFRLKKPQRRRYGLL

SEQ ID NO: 29253 - protein, 37 aa, Artificial Sequence
  Quasi-synthetic sequence derived from human genome
VKIAGVIAGILLFVIIFLGVVLVMKKRKLAKKRKETM

SEQ ID NO: 29254 - protein, 37 aa, Artificial Sequence
  Quasi-synthetic sequence derived from human genome
WKVSAVTLAYLIFCLCSLVGILHLQRALVLRRKRKRM

SEQ ID NO: 29255 - protein, 37 aa, Artificial Sequence
  Quasi-synthetic sequence derived from human genome
VGKVGQVLRVMRLMRIFRILKLARHSTGLRAFGFTLR

SEQ ID NO: 29256 - protein, 37 aa, Artificial Sequence
  Quasi-synthetic sequence derived from human genome
RWLLRTKRLHWSRLLFLLGMLIIGSTYQHLRRPRGLS

SEQ ID NO: 29257 - protein, 37 aa, Artificial Sequence
  Quasi-synthetic sequence derived from human genome
VRTRGVGKVPRKKVNVKVFIIIAVFFICFVPFHFARI

SEQ ID NO: 29258 - protein, 37 aa, Artificial Sequence
  Quasi-synthetic sequence derived from human genome
PCKTMKFIVWRRFKWVIIGLLFLLILLLFVAVLLYSL

SEQ ID NO: 29259 - protein, 37 aa, Artificial Sequence
  Quasi-synthetic sequence derived from human genome
DRARRRRRRRRRRDLLLSQLCFLASVALLLWSLSSLR

SEQ ID NO: 29260 - protein, 37 aa, Artificial Sequence
  Quasi-synthetic sequence derived from human genome
KPSRPKTSFNWFVNPLKTFVFFIWRRYWRTLVLLLLV

SEQ ID NO: 29261 - protein, 37 aa, Artificial Sequence
  Quasi-synthetic sequence derived from human genome
RLDAEVYKTARALRIVRFTKILSLLRLLRLSRLIRYI

SEQ ID NO: 29262 - protein, 37 aa, Artificial Sequence
  Quasi-synthetic sequence derived from human genome
KWKHSRTMMLVVFKSAPILKRALKVKQAMMQLYVLKL

SEQ ID NO: 29263 - protein, 37 aa, Artificial Sequence
  Quasi-synthetic sequence derived from human genome
VAKKLFVVTAVSAISVIFLAHHFKRKRGKKKGKILPW

SEQ ID NO: 29264 - protein, 37 aa, Artificial Sequence
  Quasi-synthetic sequence derived from human genome
KVALFAAVGAGCVIFLLIIIFLTVLLLKLRKRHRKHT

SEQ ID NO: 29265 - protein, 37 aa, Artificial Sequence
  Quasi-synthetic sequence derived from human genome
VKKIALREIRMLKQLKHPNLVNLIEVFRRKRKMHLVF

SEQ ID NO: 29266 - protein, 37 aa, Artificial Sequence
  Quasi-synthetic sequence derived from human genome
RAAYYQKKSRKKMCILVLVLSVIILILGLIIWLVYKT

SEQ ID NO: 29267 - protein, 37 aa, Artificial Sequence
  Quasi-synthetic sequence derived from human genome
RYLRASSNRNFLLTMRPFLKRAILVLSYVLVILYFRL

SEQ ID NO: 29268 - protein, 37 aa, Artificial Sequence
  Quasi-synthetic sequence derived from human genome
KVRHTKKKTFKCIKCSKSFFMLSCLIRHKRIHIRQNI

SEQ ID NO: 29269 - protein, 37 aa, Artificial Sequence
  Quasi-synthetic sequence derived from human genome
RALRYYYNKRILHKTKGKRFTYKFNFNKLVLVNYPFI

SEQ ID NO: 29270 - protein, 37 aa, Artificial Sequence
  Quasi-synthetic sequence derived from human genome
FFFIIGLWWCTKSILKYICKKQKRTCYLGSKTLFYRL

SEQ ID NO: 29271 - protein, 37 aa, Artificial Sequence
  Quasi-synthetic sequence derived from human genome
ISYKTFLPKCIRAKIQDYHILTRKRIRYRFRRFIQQF

SEQ ID NO: 29272 - protein, 37 aa, Artificial Sequence
  Quasi-synthetic sequence derived from human genome
AICYTGIIKTLLRCPSKKKYKAIRLIFVIMAVFFIFW

SEQ ID NO: 29273 - protein, 37 aa, Artificial Sequence
  Quasi-synthetic sequence derived from human genome
KGIQCFLVVVALLCVPWMLLFKPLVLRRQYLRRKHLG

SEQ ID NO: 29274 - protein, 37 aa, Artificial Sequence
  Quasi-synthetic sequence derived from human genome
FFIFLKILKLLISKLKAHQMCFRDYKYRLAKSTLVLI

SEQ ID NO: 29275 - protein, 37 aa, Artificial Sequence
  Quasi-synthetic sequence derived from human genome
MVGVGLCLRLLLFFRFKRTLDRICVLFLLGWHRKPRS

SEQ ID NO: 29276 - protein, 37 aa, Artificial Sequence
  Quasi-synthetic sequence derived from human genome
IFCKKCILRWLARQKTCPCCRKEVKRKKVVHMNKLRK

SEQ ID NO: 29277 - protein, 37 aa, Artificial Sequence
  Quasi-synthetic sequence derived from human genome
RLQHGNMRKNMRVLSRISKFRRLRQLLRRRKKTRQGR

SEQ ID NO: 29278 - protein, 37 aa, Artificial Sequence
  Quasi-synthetic sequence derived from human genome
WLLLVLVLVLLVSPRGCRARRGLRGLLMAHSQRLLFR

SEQ ID NO: 29279 - protein, 37 aa, Artificial Sequence
  Quasi-synthetic sequence derived from human genome
FHRLCKLLFFRIRPIFVFDGDAPLLKKQTLVKRRQRK

SEQ ID NO: 29280 - protein, 37 aa, Artificial Sequence
  Quasi-synthetic sequence derived from human genome
FLRMLIQVCLYFYCKFLWRCLKFVMRKLTGRCELQRI

SEQ ID NO: 29281 - protein, 37 aa, Artificial Sequence
  Quasi-synthetic sequence derived from human genome
RGYLARRRIRLWHRGAMVIQATWRGYRVRRNLAHLCR

SEQ ID NO: 29282 - protein, 37 aa, Artificial Sequence
  Quasi-synthetic sequence derived from human genome
QFIKMMIIFSIAFITVLIFKVYMFKCVWRCYRLIKCM

SEQ ID NO: 29283 - protein, 37 aa, Artificial Sequence
  Quasi-synthetic sequence derived from human genome
VHRILINLMKYLQKWKRYRPLWKLDKAIVMEKFAAKK

SEQ ID NO: 29284 - protein, 37 aa, Artificial Sequence
  Quasi-synthetic sequence derived from human genome
WYTPPTFMIAVFLPIVVLIFKSILFLPCLRKKILKIR

SEQ ID NO: 29285 - protein, 37 aa, Artificial Sequence
  Quasi-synthetic sequence derived from human genome
ISKLKEVTLFVKRLRRKTYLSNMAKTMRMVLKSKRRV

SEQ ID NO: 29286 - protein, 37 aa, Artificial Sequence
  Quasi-synthetic sequence derived from human genome
LWVRRKAGYKKKLWKKTPARKKRLREFVFCNKTQSKL

SEQ ID NO: 29287 - protein, 37 aa, Artificial Sequence
  Quasi-synthetic sequence derived from human genome
IFRLVQASGQKAPRPAARRKARRLLKTVLMILLAFLV

SEQ ID NO: 29288 - protein, 37 aa, Artificial Sequence
  Quasi-synthetic sequence derived from human genome
LRKYIYIRSCVVIIQKRFRCFQAQKLYKRRKESILTI

SEQ ID NO: 29289 - protein, 37 aa, Artificial Sequence
  Quasi-synthetic sequence derived from human genome
SGGILIYKNRVRMNTFPWLKIVKISFKCKQFFIQLRK

SEQ ID NO: 29290 - protein, 37 aa, Artificial Sequence
  Quasi-synthetic sequence derived from human genome
MPGRLLRGLWQRWRRYKYRFVPWIALNLSHNPRTLRY

SEQ ID NO: 29291 - protein, 37 aa, Artificial Sequence
  Quasi-synthetic sequence derived from human genome
KPFFRLQKFLRRTQFLLFFLTAAYLMTGSLLLLQRVR

SEQ ID NO: 29292 - protein, 37 aa, Artificial Sequence
  Quasi-synthetic sequence derived from human genome
IRKYISKYSVFLRHRYQSRSAFLGRYLKKKKSVVSRL

SEQ ID NO: 29293 - protein, 37 aa, Artificial Sequence
  Quasi-synthetic sequence derived from human genome
WRRYRAKKYLCKVKAACKIQAWYRCWRAHKEYLAILK

SEQ ID NO: 29294 - protein, 37 aa, Artificial Sequence
  Quasi-synthetic sequence derived from human genome
LFPEFRPGKVLRFLRLFGPGKNVPSVWRSARRKRKKK

SEQ ID NO: 29295 - protein, 37 aa, Artificial Sequence
  Quasi-synthetic sequence derived from human genome
LFAFFIFIMSLLLISGQRPVNLTMRRKLRKHNCLQRR

SEQ ID NO: 29296 - protein, 37 aa, Artificial Sequence
  Quasi-synthetic sequence derived from human genome
ISLRFKRTHIKMKKQPKGYGLRCHRAIITICRLIGIK

SEQ ID NO: 29297 - protein, 37 aa, Artificial Sequence
  Quasi-synthetic sequence derived from human genome
RRQKLLLAQLHHRKRVKAAGQIQAWWRGVLVRRTLLV

SEQ ID NO: 29298 - protein, 37 aa, Artificial Sequence
  Quasi-synthetic sequence derived from human genome
KKKKKKKKKRQCFAFLIYFRLGIKMGKQGIINKEGYL

SEQ ID NO: 29299 - protein, 37 aa, Artificial Sequence
  Quasi-synthetic sequence derived from human genome
LYKRYGGFLRRIRPKLKWDNQKRYGGFLRRQFKVVTR

SEQ ID NO: 29300 - protein, 37 aa, Artificial Sequence
  Quasi-synthetic sequence derived from human genome
LVPLLVLALASYRRLCLRLRLADCLVPYSRALYRRRR

SEQ ID NO: 29301 - protein, 37 aa, Artificial Sequence
  Quasi-synthetic sequence derived from human genome
MIEKYFVSPTLFRVIRLARIGRILRLIKGAKGIRTLL

SEQ ID NO: 29302 - protein, 37 aa, Artificial Sequence
  Quasi-synthetic sequence derived from human genome
IILKLYRVLQLFLSRTAQRSALLSSGRLLRRLGLLLL

SEQ ID NO: 29303 - protein, 37 aa, Artificial Sequence
  Quasi-synthetic sequence derived from human genome
RCRAYLVRKAFRHRLWAVLTVQAYARGMIARRLHQRL

SEQ ID NO: 29304 - protein, 37 aa, Artificial Sequence
  Quasi-synthetic sequence derived from human genome
KRAIRIILSFFFLFLLYFLAFLIASFGNFLPKTKMAK

SEQ ID NO: 29305 - protein, 37 aa, Artificial Sequence
  Quasi-synthetic sequence derived from human genome
WVYLLLRKILLRKFCQMRKRRLREQLICSLQNSQIQR

SEQ ID NO: 29306 - protein, 37 aa, Artificial Sequence
  Quasi-synthetic sequence derived from human genome
WRRRKSLWLALSASWLLLVLLGGFSLLRLALPPRPRP

SEQ ID NO: 29307 - protein, 37 aa, Artificial Sequence
  Quasi-synthetic sequence derived from human genome
WWRGTLGRRKAAKRKWAAQTIRRLIRGFVLRHAPRCP

SEQ ID NO: 29308 - protein, 37 aa, Artificial Sequence
  Quasi-synthetic sequence derived from human genome
RLTRWRTRYKTIRINLGLWAASFILALPVWVYSKVIK

SEQ ID NO: 29309 - protein, 37 aa, Artificial Sequence
  Quasi-synthetic sequence derived from human genome
KWRLPRISARAPYRLRRLRRHTYWPPRRPVAASRCWP

SEQ ID NO: 29310 - protein, 37 aa, Artificial Sequence
  Quasi-synthetic sequence derived from human genome
QIRKRLRCRRKTVLVLMCILTAYVLCWAPFYGFTIVR

SEQ ID NO: 29311 - protein, 37 aa, Artificial Sequence
  Quasi-synthetic sequence derived from human genome
IFYLLKIVNFSRLIFHHLKRKAKSVVLVIVLGSLFFL

SEQ ID NO: 29312 - protein, 37 aa, Artificial Sequence
  Quasi-synthetic sequence derived from human genome
KRLPVKRAAVQFLNNAWGIQKKQNAKRFKRRWMVRKM

SEQ ID NO: 29313 - protein, 37 aa, Artificial Sequence
  Quasi-synthetic sequence derived from human genome
RWARPFYLAFVFCLALGLLQAIKLYLRRQRLLRDLRP

SEQ ID NO: 29314 - protein, 37 aa, Artificial Sequence
  Quasi-synthetic sequence derived from human genome
FPPLYYRRAHRRFVTKKALCIRVFQETQKLKKRRRAL

SEQ ID NO: 29315 - protein, 37 aa, Artificial Sequence
  Quasi-synthetic sequence derived from human genome
RIANFSNLIFLRIKRRVKSVVLVILLGPLLFLVCHLF

SEQ ID NO: 29316 - protein, 37 aa, Artificial Sequence
  Quasi-synthetic sequence derived from human genome
LLLLVVCGIGCVWHWKHRVATRFTLPRFLQRRSSRRK

SEQ ID NO: 29317 - protein, 37 aa, Artificial Sequence
  Quasi-synthetic sequence derived from human genome
MASWLRRKLRGKRRPVIAFCLLMILSAMAVTRFPPQR

SEQ ID NO: 29318 - protein, 37 aa, Artificial Sequence
  Quasi-synthetic sequence derived from human genome
KKTSFKDCIPRSFRRHIRQHSALTRLRLRNVFRRFLR

SEQ ID NO: 29319 - protein, 37 aa, Artificial Sequence
  Quasi-synthetic sequence derived from human genome
ALAAQLALLGLGLLHALLLVLLLCRLRRLRARARARA

SEQ ID NO: 29320 - protein, 37 aa, Artificial Sequence
  Quasi-synthetic sequence derived from human genome
RILFLKPSCMLEVITWPIQAFVKRKVIIFLKKCLLCK

SEQ ID NO: 29321 - protein, 37 aa, Artificial Sequence
  Quasi-synthetic sequence derived from human genome
RSKTRLKSQLLLQKYIAQRKWKKHFYVVTAANRLRKF

SEQ ID NO: 29322 - protein, 37 aa, Artificial Sequence
  Quasi-synthetic sequence derived from human genome
RLVVYKIVYMFLFLLCLTLFQVYYSLWRKLLKAFWWL

SEQ ID NO: 29323 - protein, 37 aa, Artificial Sequence
  Quasi-synthetic sequence derived from human genome
RRKVSKIQRFHARSLWTNHKRYGYKKHSYRLVKKLKL

SEQ ID NO: 29324 - protein, 37 aa, Artificial Sequence
  Quasi-synthetic sequence derived from human genome
IKIYIVLRRRRKRVNTKRSSRAFRAHLRAPLKEAARR

SEQ ID NO: 29325 - protein, 37 aa, Artificial Sequence
  Quasi-synthetic sequence derived from human genome
RIAFWLQWFNSFVNPLLYPLCHKRFQKAFLKIFCIKK

SEQ ID NO: 29326 - protein, 37 aa, Artificial Sequence
  Quasi-synthetic sequence derived from human genome
RIDSEVYKTARALRIVRFTKILSLLRLLRLSRLIRYI

SEQ ID NO: 29327 - protein, 37 aa, Artificial Sequence
  Quasi-synthetic sequence derived from human genome
KLVLKLPWTQVGFSLLFLYLGSGGWRFIRVFIKTIRR

SEQ ID NO: 29328 - protein, 37 aa, Artificial Sequence
  Quasi-synthetic sequence derived from human genome
LLIIRSLRQGLRVEKRLKTKAVRMIAIVLAIFLVCFV

SEQ ID NO: 29329 - protein, 37 aa, Artificial Sequence
  Quasi-synthetic sequence derived from human genome
VFILYFKPSVFRCIALRWVRLLGFAIVYGTIILKLYR

SEQ ID NO: 29330 - protein, 37 aa, Artificial Sequence
  Quasi-synthetic sequence derived from human genome
KTARLFSKKIFCCLFFITLFFIRLLSYMFFHVRFINP

SEQ ID NO: 29331 - protein, 37 aa, Artificial Sequence
  Quasi-synthetic sequence derived from human genome
RRMPGIGWLKKCYQMIDRRLRKNLKSLIIVHPSWFIR

SEQ ID NO: 29332 - protein, 37 aa, Artificial Sequence
  Quasi-synthetic sequence derived from human genome
FSPLRILRKRNKALRKIRKLQKQGLLQVTPKGFICTV

SEQ ID NO: 29333 - protein, 37 aa, Artificial Sequence
  Quasi-synthetic sequence derived from human genome
QMRLKKHRWYKKILKSRDPIIFSVGWRRFQTIPLYYI

SEQ ID NO: 29334 - protein, 37 aa, Artificial Sequence
  Quasi-synthetic sequence derived from human genome
IFKKKAHKLTSAPLKQNFQKLLKLFYIKKLKPLYNYN

SEQ ID NO: 29335 - protein, 37 aa, Artificial Sequence
  Quasi-synthetic sequence derived from human genome
RLQQGNMRKNVRVLSRTSKFRRLRQLLRRRKKRWQGR

SEQ ID NO: 29336 - protein, 37 aa, Artificial Sequence
  Quasi-synthetic sequence derived from human genome
KLRIRTKAAVKIQAWWRGTLVRRTLLHAALRAWIIQC

SEQ ID NO: 29337 - protein, 37 aa, Artificial Sequence
  Quasi-synthetic sequence derived from human genome
RKITSRPFTRFRTAVRVVIAILRLRFLVKKWQEVDRK

SEQ ID NO: 29338 - protein, 37 aa, Artificial Sequence
  Quasi-synthetic sequence derived from human genome
RLRKILFCVLGLYIAIPFLIKLCPGIQAKLIFLNFVR

SEQ ID NO: 29339 - protein, 37 aa, Artificial Sequence
  Quasi-synthetic sequence derived from human genome
RAFRRANARCFWNARLARAASRLAFQGWLRRGVLLVR

SEQ ID NO: 29340 - protein, 37 aa, Artificial Sequence
  Quasi-synthetic sequence derived from human genome
LRSVWNFLKRHKKKCIFLGTVLGGVYILGKYGQKKIR

SEQ ID NO: 29341 - protein, 37 aa, Artificial Sequence
  Quasi-synthetic sequence derived from human genome
LVLGIMAKLLPLRALPLLFNLIKVVPRVFGRMVGKSR

SEQ ID NO: 29342 - protein, 37 aa, Artificial Sequence
  Quasi-synthetic sequence derived from human genome
QRPKGYRKLLALGTWLLALLLTLPVMLAMRLVRRGPK

SEQ ID NO: 29343 - protein, 37 aa, Artificial Sequence
  Quasi-synthetic sequence derived from human genome
LLLKRFLLARRSRRGLFAQIVLPALFVGLALVFSLIV

SEQ ID NO: 29344 - protein, 37 aa, Artificial Sequence
  Quasi-synthetic sequence derived from human genome
RALRYYYNKRILHKTKGKRFTYKFNFSKVVLVNYPLL

SEQ ID NO: 29345 - protein, 37 aa, Artificial Sequence
  Quasi-synthetic sequence derived from human genome
WVKRHRSSFRNRFPLLKVLILQRNKLSDTPKGLWKLK

SEQ ID NO: 29346 - protein, 37 aa, Artificial Sequence
  Quasi-synthetic sequence derived from human genome
RIIRFLPLFKIIVPILIRIADVQIKKRLSLMYSITKG

SEQ ID NO: 29347 - protein, 37 aa, Artificial Sequence
  Quasi-synthetic sequence derived from human genome
FKKGKIVLLFSLLCWVLFNLGIGFVKPATLRCVPKIR

SEQ ID NO: 29348 - protein, 37 aa, Artificial Sequence
  Quasi-synthetic sequence derived from human genome
FKNIFITMFATFFFFKLLIKVFLALLTHFYIVKGNRK

SEQ ID NO: 29349 - protein, 37 aa, Artificial Sequence
  Quasi-synthetic sequence derived from human genome
VIIQKRVRGWLARTHYKRSMHAIIYLQCCFRRMMAKR

SEQ ID NO: 29350 - protein, 37 aa, Artificial Sequence
  Quasi-synthetic sequence derived from human genome
VKQGYVKIRSRKLGIFRRCWLVFKKASSKGPRRLEKF

SEQ ID NO: 29351 - protein, 37 aa, Artificial Sequence
  Quasi-synthetic sequence derived from human genome
YLRRFREMKPRVLQRWSRQILRGLHFLHSRVPPILHR

SEQ ID NO: 29352 - protein, 37 aa, Artificial Sequence
  Quasi-synthetic sequence derived from human genome
VLAMFFLLVLILSSVFLFRLFKRRQGRIFPEGKMWKL

SEQ ID NO: 29353 - protein, 37 aa, Artificial Sequence
  Quasi-synthetic sequence derived from human genome
CKEYLRPLKKFLRKLHLPRDLPQKKKLKYMKQSLVVL

SEQ ID NO: 29354 - protein, 37 aa, Artificial Sequence
  Quasi-synthetic sequence derived from human genome
ILYNLVSANFRHIFLATLACLCPVWRRRRKRPAFSRK

SEQ ID NO: 29355 - protein, 37 aa, Artificial Sequence
  Quasi-synthetic sequence derived from human genome
FFYLSLFFWMLFKALLIIYGILVIFRRMMKSRMMVIG

SEQ ID NO: 29356 - protein, 37 aa, Artificial Sequence
  Quasi-synthetic sequence derived from human genome
RLRRANRVLRARCRRAVKSNACYWAVLLLVFLNTLTI

SEQ ID NO: 29357 - protein, 37 aa, Artificial Sequence
  Quasi-synthetic sequence derived from human genome
VLYTDLLRRLRAVRLRSGAKALGKARRKVTVLVLVVL

SEQ ID NO: 29358 - protein, 37 aa, Artificial Sequence
  Quasi-synthetic sequence derived from human genome
YFLFICPFVLLLLLLISLLCLYWKARKLSTLRSNTRK

SEQ ID NO: 29359 - protein, 37 aa, Artificial Sequence
  Quasi-synthetic sequence derived from human genome
LRALRLLRIFKVTKYWASLRNLVVSLLNSMKSIISLL

SEQ ID NO: 29360 - protein, 37 aa, Artificial Sequence
  Quasi-synthetic sequence derived from human genome
KNFNLPRLCIRKFFPKKKCFVFDLPIHRRKLAQLEKL

SEQ ID NO: 29361 - protein, 37 aa, Artificial Sequence
  Quasi-synthetic sequence derived from human genome
VHLLKIKNTFCLWKRLIKLKDNHCEQLRVKIRKLKNK

SEQ ID NO: 29362 - protein, 37 aa, Artificial Sequence
  Quasi-synthetic sequence derived from human genome
KLWFKFQRYFRRKPVRFFTFLALYLTAGSLVFLHSGF

SEQ ID NO: 29363 - protein, 37 aa, Artificial Sequence
  Quasi-synthetic sequence derived from human genome
MRRIRYEFKAKNIKKKKVSIMVSVDGVKVILKKKKKK

SEQ ID NO: 29364 - protein, 37 aa, Artificial Sequence
  Quasi-synthetic sequence derived from human genome
MFAKTWRVHAIFKNVKMKKKIIKDQKLLVIVGGMLLI

SEQ ID NO: 29365 - protein, 37 aa, Artificial Sequence
  Quasi-synthetic sequence derived from human genome
SYQKLLKYYVLNALKHRPPKAQKKRYLFRSFKATKFF

SEQ ID NO: 29366 - protein, 37 aa, Artificial Sequence
  Quasi-synthetic sequence derived from human genome
HVRIRVIKKKKVIMKKRKKLTLTRPTPLVTAGPLVTP

SEQ ID NO: 29367 - protein, 37 aa, Artificial Sequence
  Quasi-synthetic sequence derived from human genome
TKKAIKYQSKARRKLMFIIICVIVLLVILGIILATTL

SEQ ID NO: 29368 - protein, 37 aa, Artificial Sequence
  Quasi-synthetic sequence derived from human genome
KHLRKSLKIIYLNSIQQLEIRNMSWPRLIRKLRCYLK

SEQ ID NO: 29369 - protein, 37 aa, Artificial Sequence
  Quasi-synthetic sequence derived from human genome
RKQIKRKAPRGFLKRVFKRKKPQLRLEKSGDLLVRFH

SEQ ID NO: 29370 - protein, 37 aa, Artificial Sequence
  Quasi-synthetic sequence derived from human genome
RRRRSRSVVRRRSFSISPVRLRRSRTPLRRRFSRSPI

SEQ ID NO: 29371 - protein, 37 aa, Artificial Sequence
  Quasi-synthetic sequence derived from human genome
LLLGKGCRYFRYILKQDHQILGKKIKRMKRSVKKYSI

SEQ ID NO: 29372 - protein, 37 aa, Artificial Sequence
  Quasi-synthetic sequence derived from human genome
NTIRRKTKDAFYKNIVKKGYLLKKGKGKRWKNLYFIL

SEQ ID NO: 29373 - protein, 37 aa, Artificial Sequence
  Quasi-synthetic sequence derived from human genome
AISVVKILRVLRVLRPLRAINRAKGLKHVVQCMFVAI

SEQ ID NO: 29374 - protein, 37 aa, Artificial Sequence
  Quasi-synthetic sequence derived from human genome
KYKKNLKALYVVHPTSFIKVLWNILKPLISHKFGKKV

SEQ ID NO: 29375 - protein, 37 aa, Artificial Sequence
  Quasi-synthetic sequence derived from human genome
LVWRVLHALLCLHRTLTSWLRVRFGTWNWIWRRCCRA

SEQ ID NO: 29376 - protein, 37 aa, Artificial Sequence
  Quasi-synthetic sequence derived from human genome
RRHLKSMHSSATLIQSRFRSLLVRRRFISLKKATIFV

SEQ ID NO: 29377 - protein, 37 aa, Artificial Sequence
  Quasi-synthetic sequence derived from human genome
IICYTGIIKILLRRPNEKKSKAVRLIFVIMIIFFLFW

SEQ ID NO: 29378 - protein, 37 aa, Artificial Sequence
  Quasi-synthetic sequence derived from human genome
RHMGIGKRKGTANARMPEKVTWMRRMRILRRLLRRYR

SEQ ID NO: 29379 - protein, 37 aa, Artificial Sequence
  Quasi-synthetic sequence derived from human genome
KKRAKTITFSKNAVISKRGGKLCLLIRVANLRKSLLI

SEQ ID NO: 29380 - protein, 37 aa, Artificial Sequence
  Quasi-synthetic sequence derived from human genome
RARGYLARQRYQQMRRSLVKFRSLVHAYVSRRRYLKL

SEQ ID NO: 29381 - protein, 37 aa, Artificial Sequence
  Quasi-synthetic sequence derived from human genome
KIANFSNLIFLRLKRRVKSVILVVLLGPLLFLACHLF

SEQ ID NO: 29382 - protein, 37 aa, Artificial Sequence
  Quasi-synthetic sequence derived from human genome
MLRTLLRRRLFSYPTKYYFMVLVLSLITFSVLRIHQK

SEQ ID NO: 29383 - protein, 37 aa, Artificial Sequence
  Quasi-synthetic sequence derived from human genome
WRFIRVFIKTIRRDIFGGLVLLKVKAKVRQCLQERRT

SEQ ID NO: 29384 - protein, 37 aa, Artificial Sequence
  Quasi-synthetic sequence derived from human genome
VIGILVAVILLLLLLLLLFLILRHRRQGKHWTSTQRK

SEQ ID NO: 29385 - protein, 37 aa, Artificial Sequence
  Quasi-synthetic sequence derived from human genome
LLWKNVTLKRRSPWVLAFEIFIPLVLFFILLGLRQKK

SEQ ID NO: 29386 - protein, 37 aa, Artificial Sequence
  Quasi-synthetic sequence derived from human genome
LTVNALLVLLALAAWASRWLRRKLRARRKGGAPVHVR

SEQ ID NO: 29387 - protein, 37 aa, Artificial Sequence
  Quasi-synthetic sequence derived from human genome
RRMPGLGWMKKCYQMIDRRLRKNLKSFIIVHPSWFIR

SEQ ID NO: 29388 - protein, 37 aa, Artificial Sequence
  Quasi-synthetic sequence derived from human genome
LIRHHVLTWVKFIIGYLFPLLTMSICYLCLIFKVKKR

SEQ ID NO: 29389 - protein, 37 aa, Artificial Sequence
  Quasi-synthetic sequence derived from human genome
LKIKLAVRMDKPQNMKHSGYLWAIGKNVWKRWKKRFF

SEQ ID NO: 29390 - protein, 37 aa, Artificial Sequence
  Quasi-synthetic sequence derived from human genome
LLWKRLLIARRSRKGFFAQIVLPAVFVCIALVFSLIV

SEQ ID NO: 29391 - protein, 37 aa, Artificial Sequence
  Quasi-synthetic sequence derived from human genome
KLVSPKWKNFKGLKLLCRDKIRLNNAIWRAWYIQYVK

SEQ ID NO: 29392 - protein, 37 aa, Artificial Sequence
  Quasi-synthetic sequence derived from human genome
RWKKVQWCSLSVIKLKNKIKYRAEACIKMQKTIRMWL

SEQ ID NO: 29393 - protein, 37 aa, Artificial Sequence
  Quasi-synthetic sequence derived from human genome
RRKLYIHRVTLRKLLPGVQYVYRCGSAQGWSRRFRFR

SEQ ID NO: 29394 - protein, 37 aa, Artificial Sequence
  Quasi-synthetic sequence derived from human genome
RRQRKLHFVVGGFAYLLPKTAVVLRCPARRVRKPLIT

SEQ ID NO: 29395 - protein, 37 aa, Artificial Sequence
  Quasi-synthetic sequence derived from human genome
RGRPRLRLGERGLMEPLLPPKRRLLPRVRLLPLLLAL

SEQ ID NO: 29396 - protein, 37 aa, Artificial Sequence
  Quasi-synthetic sequence derived from human genome
SIISAVVGILLVVVLGVVFGILIKRRQQKIRKYTMRR

SEQ ID NO: 29397 - protein, 37 aa, Artificial Sequence
  Quasi-synthetic sequence derived from human genome
KLYACKKLNKKRLKKRKGYQGAMVEKKILMKVHSRFI

SEQ ID NO: 29398 - protein, 37 aa, Artificial Sequence
  Quasi-synthetic sequence derived from human genome
WLVLRYRHKRLSYQSVFLFLCLFWASLRTVLFSFYFK

SEQ ID NO: 29399 - protein, 37 aa, Artificial Sequence
  Quasi-synthetic sequence derived from human genome
KRCIKKFSIQRFPKILVLHLKRFSESRIRTSKLTTFV

SEQ ID NO: 29400 - protein, 37 aa, Artificial Sequence
  Quasi-synthetic sequence derived from human genome
TLVIPLLNPFIYSLRNKEVINIMKKIMKKRKFCHILK

SEQ ID NO: 29401 - protein, 37 aa, Artificial Sequence
  Quasi-synthetic sequence derived from human genome
RIKTSIFSLFRAPKLRMRVFGLCFVRFAITVPFYGLI

SEQ ID NO: 29402 - protein, 37 aa, Artificial Sequence
  Quasi-synthetic sequence derived from human genome
LKKKLFLTLKENEKLRKRLQAQRLVMRRMSSRLRACK

SEQ ID NO: 29403 - protein, 37 aa, Artificial Sequence
  Quasi-synthetic sequence derived from human genome
RKNYGLMRLGFLRLQALHRSRKLHQQYRLARQRIIQF

SEQ ID NO: 29404 - protein, 37 aa, Artificial Sequence
  Quasi-synthetic sequence derived from human genome
PRGQKKKKVVKYGMGGMIIVLLICIVWFPLLFMSLIK

SEQ ID NO: 29405 - protein, 37 aa, Artificial Sequence
  Quasi-synthetic sequence derived from human genome
RRLRKNLKSFIIVHPSWFIRTILAVTRPFISSKFSSK

SEQ ID NO: 29406 - protein, 37 aa, Artificial Sequence
  Quasi-synthetic sequence derived from human genome
AWARMWAARRQYLRRLHYFQKNVNSIVKIQAFFRARK

SEQ ID NO: 29407 - protein, 37 aa, Artificial Sequence
  Quasi-synthetic sequence derived from human genome
FKKFYFHQHLCILKAKLGRPVTWNRQLRHFQGRKKAL

SEQ ID NO: 29408 - protein, 37 aa, Artificial Sequence
  Quasi-synthetic sequence derived from human genome
RIGRILRLIRAAKGIRTLLFALMMSLPALFNIGLLLF

SEQ ID NO: 29409 - protein, 37 aa, Artificial Sequence
  Quasi-synthetic sequence derived from human genome
LGRKWHKASNYIFVAIFWIVFLLLIVFYTAITKKIFK

SEQ ID NO: 29410 - protein, 37 aa, Artificial Sequence
  Quasi-synthetic sequence derived from human genome
IRSWLTRKHIQRLHAAATVIKRAWQKWRIRMACLAAK

SEQ ID NO: 29411 - protein, 37 aa, Artificial Sequence
  Quasi-synthetic sequence derived from human genome
IYCFYVYGARLYCLKIHGLSSLWRLFRGKKWNVLRQR

SEQ ID NO: 29412 - protein, 37 aa, Artificial Sequence
  Quasi-synthetic sequence derived from human genome
RLRHPRTRWKNWWVRGILTLAMIAFFFIIIYLGPMVL

SEQ ID NO: 29413 - protein, 37 aa, Artificial Sequence
  Quasi-synthetic sequence derived from human genome
LKWKIFTNFKMNILGLLIPFTIFMFCYIKILHQLKRC

SEQ ID NO: 29414 - protein, 37 aa, Artificial Sequence
  Quasi-synthetic sequence derived from human genome
KSKIKSKYASYLSFIKILLKRGGVKVSTKNLIKLFQI

SEQ ID NO: 29415 - protein, 37 aa, Artificial Sequence
  Quasi-synthetic sequence derived from human genome
KILWKVPSFLITQVRRMNEATMLLKKQLPSVRKLLRR

SEQ ID NO: 29416 - protein, 37 aa, Artificial Sequence
  Quasi-synthetic sequence derived from human genome
LKRSIKLLSLIKWKGSKSSKLNSKFWKHLVYEMPIKK

SEQ ID NO: 29417 - protein, 37 aa, Artificial Sequence
  Quasi-synthetic sequence derived from human genome
LFHLLVQKSKKSSTFKFYRRHKMPAPAQRKLLPRRHL

SEQ ID NO: 29418 - protein, 37 aa, Artificial Sequence
  Quasi-synthetic sequence derived from human genome
RQRVLPRMQARMRGFQARKRYLRRRAALGQLNTILLV

SEQ ID NO: 29419 - protein, 37 aa, Artificial Sequence
  Quasi-synthetic sequence derived from human genome
LKKKLFKRRRVLNRERRLRHRVVGAVIDQGLITRHHL

SEQ ID NO: 29420 - protein, 37 aa, Artificial Sequence
  Quasi-synthetic sequence derived from human genome
YLSLPKTPKMLKMSKGLDARSKRWLKIIWRRHGIWPL

SEQ ID NO: 29421 - protein, 37 aa, Artificial Sequence
  Quasi-synthetic sequence derived from human genome
WIFWKTWIFWKTWIFRKTYIGWKTWIFSGRCGLTGRP

SEQ ID NO: 29422 - protein, 37 aa, Artificial Sequence
  Quasi-synthetic sequence derived from human genome
ILTRKRIRYRFRRFIQQFSQCKATARNLKLKYLINLE

SEQ ID NO: 29423 - protein, 37 aa, Artificial Sequence
  Quasi-synthetic sequence derived from human genome
LIIGLRKTFWFFFQRHKLKGTSFLLGGVVIVLLRWPL

SEQ ID NO: 29424 - protein, 37 aa, Artificial Sequence
  Quasi-synthetic sequence derived from human genome
LFLLSATFNASFLLKLQKWTQKKEKGKKLSRMKLLLK

SEQ ID NO: 29425 - protein, 37 aa, Artificial Sequence
  Quasi-synthetic sequence derived from human genome
KVYKSIYFLGHIFFLSLLFILPYIHKAMVPRKEKLKK

SEQ ID NO: 29426 - protein, 37 aa, Artificial Sequence
  Quasi-synthetic sequence derived from human genome
WRGVSFVYNHYLFSGCFLVVLLAILLYLLRLRRIHRR

SEQ ID NO: 29427 - protein, 37 aa, Artificial Sequence
  Quasi-synthetic sequence derived from human genome
AGLLMFIIILLGVMLTIKRRRNAYSYSYYLKLAKKQK

SEQ ID NO: 29428 - protein, 37 aa, Artificial Sequence
  Quasi-synthetic sequence derived from human genome
KLRLDKLRQSCVMVQKHMRGWLQRKKFLRERRAALII

SEQ ID NO: 29429 - protein, 37 aa, Artificial Sequence
  Quasi-synthetic sequence derived from human genome
KKRNSTLYITMLLIVPVIVAGAIIVLLLYLKRLKIII

SEQ ID NO: 29430 - protein, 37 aa, Artificial Sequence
  Quasi-synthetic sequence derived from human genome
ALASCTRCLNKIMKTRVCRRLRRANRVLRARCRRAVK

SEQ ID NO: 29431 - protein, 37 aa, Artificial Sequence
  Quasi-synthetic sequence derived from human genome
RKKRSWYLTWKYKLTNQRALRRFCQTGAVLFLLVTVI

SEQ ID NO: 29432 - protein, 37 aa, Artificial Sequence
  Quasi-synthetic sequence derived from human genome
ILKTLLRCRNEKKRHRAVRLIFTIMIVYFLFWAPYNI

SEQ ID NO: 29433 - protein, 37 aa, Artificial Sequence
  Quasi-synthetic sequence derived from human genome
IRFPGRRGYGRLRPRARSLSKASTAINWLTKKFLLKK

SEQ ID NO: 29434 - protein, 37 aa, Artificial Sequence
  Quasi-synthetic sequence derived from human genome
RRRQGWLKEIRKLQKSTHLLIRKLPFSRLAREICVKF

SEQ ID NO: 29435 - protein, 37 aa, Artificial Sequence
  Quasi-synthetic sequence derived from human genome
KMKKKTFKGLIRIFRKGVIAVLAANRLKILGQSCASL

SEQ ID NO: 29436 - protein, 37 aa, Artificial Sequence
  Quasi-synthetic sequence derived from human genome
KKVLNLLKGAFPARLKKVLIVGAPIWFRVPYSIISLL

SEQ ID NO: 29437 - protein, 37 aa, Artificial Sequence
  Quasi-synthetic sequence derived from human genome
GFRCQFANGIFQLWFHFKRYRYRRPGPCWRPIRHCRR

SEQ ID NO: 29438 - protein, 37 aa, Artificial Sequence
  Quasi-synthetic sequence derived from human genome
KLSKRQLFFRKKLLHSSQMLRAVSLGQDRYRRRYWVL

SEQ ID NO: 29439 - protein, 37 aa, Artificial Sequence
  Quasi-synthetic sequence derived from human genome
LKVIGKGSFGKVLLAKRKLDGKFYAVKVLQKKIVLNR

SEQ ID NO: 29440 - protein, 37 aa, Artificial Sequence
  Quasi-synthetic sequence derived from human genome
CLKQKARRLTILLLLAFYVCFLPFHILRVIRIESRLL

SEQ ID NO: 29441 - protein, 37 aa, Artificial Sequence
  Quasi-synthetic sequence derived from human genome
MKRKKRVHFHGFMLDVHKRIHRLKQSLPKRKPGFMAK

SEQ ID NO: 29442 - protein, 37 aa, Artificial Sequence
  Quasi-synthetic sequence derived from human genome
CANGLLIYKDRLRINRFAWPKILKISYKRSNFYIKVR

SEQ ID NO: 29443 - protein, 37 aa, Artificial Sequence
  Quasi-synthetic sequence derived from human genome
LGLLVAGVLVLLVSLGVAIHLCCRRRRARLRFMKQFY

SEQ ID NO: 29444 - protein, 37 aa, Artificial Sequence
  Quasi-synthetic sequence derived from human genome
ALWRQQVCAIAKVRFLKLKKERKSLWTILLLFGISFI

SEQ ID NO: 29445 - protein, 37 aa, Artificial Sequence
  Quasi-synthetic sequence derived from human genome
LIQAYWKGFQTRKRLKKLPSAVIALQRSFRSKRSKML

SEQ ID NO: 29446 - protein, 37 aa, Artificial Sequence
  Quasi-synthetic sequence derived from human genome
WQVKRKFKHFQEFHRELLKYKAFIRIPIPTRRHTFRR

SEQ ID NO: 29447 - protein, 37 aa, Artificial Sequence
  Quasi-synthetic sequence derived from human genome
VRALWFWAFSLQAKVWATWLAFVLERRRKKARLQWAL

SEQ ID NO: 29448 - protein, 37 aa, Artificial Sequence
  Quasi-synthetic sequence derived from human genome
LGLLILLRLWRVARIINGIIISVKTRSERQLLRLKQM

SEQ ID NO: 29449 - protein, 37 aa, Artificial Sequence
  Quasi-synthetic sequence derived from human genome
QRVLLLFRAAQCSFPVAQWYILQLRWARKVMQKIRMK

SEQ ID NO: 29450 - protein, 37 aa, Artificial Sequence
  Quasi-synthetic sequence derived from human genome
SRISITFFRLFRVMRLVKLLSRGEGIRTLLWTFIKSF

SEQ ID NO: 29451 - protein, 37 aa, Artificial Sequence
  Quasi-synthetic sequence derived from human genome
KKKMSKLSRSARAGVIFPVGRLMRYLKKGTFKYRISV

SEQ ID NO: 29452 - protein, 37 aa, Artificial Sequence
  Quasi-synthetic sequence derived from human genome
LRGYRYRKEFLRQRRAAVTLQAWWRGYCNRRNFKLIL

SEQ ID NO: 29453 - protein, 37 aa, Artificial Sequence
  Quasi-synthetic sequence derived from human genome
RPHLPGKKKIRWDPVRRRFIQSCPIIRIPNRFLRGHR

SEQ ID NO: 29454 - protein, 37 aa, Artificial Sequence
  Quasi-synthetic sequence derived from human genome
RKRKNSVKVMYKCLWPNCGKVLRSIVGIKRHVKALHL

SEQ ID NO: 29455 - protein, 37 aa, Artificial Sequence
  Quasi-synthetic sequence derived from human genome
CWKFFIDRIRRQLKVTLCFSPVGNKLRVRSRKFPAIV

SEQ ID NO: 29456 - protein, 37 aa, Artificial Sequence
  Quasi-synthetic sequence derived from human genome
FRLIRKMFSFKVSRWMGLACFRSLAASSPSIRQKKLM

SEQ ID NO: 29457 - protein, 37 aa, Artificial Sequence
  Quasi-synthetic sequence derived from human genome
RRPRPRRELSLGRKKAPHRLCGRFSRISMKLPRIPLR

SEQ ID NO: 29458 - protein, 37 aa, Artificial Sequence
  Quasi-synthetic sequence derived from human genome
LRLPKRLRVVYFLARTRLAQRLIMAGTVVWIGILVYT

SEQ ID NO: 29459 - protein, 37 aa, Artificial Sequence
  Quasi-synthetic sequence derived from human genome
RLLRIFKITKYWASLRNLVVSLMSSMKSIISLLFLLF

SEQ ID NO: 29460 - protein, 37 aa, Artificial Sequence
  Quasi-synthetic sequence derived from human genome
YLKVFYKFLNSNRHTIRHTGKKCFKCKKCVKSFCIRL

SEQ ID NO: 29461 - protein, 37 aa, Artificial Sequence
  Quasi-synthetic sequence derived from human genome
RMVWRLLHGQVLTRRERRRLLRTCVDFFRLVPFMVFL

SEQ ID NO: 29462 - protein, 37 aa, Artificial Sequence
  Quasi-synthetic sequence derived from human genome
IRSYILNKDLLRKALILMNSKHTHLILCVLRFMRRMI

SEQ ID NO: 29463 - protein, 37 aa, Artificial Sequence
  Quasi-synthetic sequence derived from human genome
ARLRQKVAVKKLSRPFQSLIHARRTYRELRLLKHLKH

SEQ ID NO: 29464 - protein, 37 aa, Artificial Sequence
  Quasi-synthetic sequence derived from human genome
LGLFQGPALGLRNHLGRKLRRRKKKKAKRTTNWKIIT

SEQ ID NO: 29465 - protein, 37 aa, Artificial Sequence
  Quasi-synthetic sequence derived from human genome
RKLITKYNRRELTDKLLIFLALALFLATVLYIVKKRL

SEQ ID NO: 29466 - protein, 37 aa, Artificial Sequence
  Quasi-synthetic sequence derived from human genome
RYFRIQEVLKHARHFRGRKNRCYRLAVRTVIRAFVKC

SEQ ID NO: 29467 - protein, 37 aa, Artificial Sequence
  Quasi-synthetic sequence derived from human genome
CSQRRRRAMRAFRMLLYSKSTSLTFHWKLWGRHRGRR

SEQ ID NO: 29468 - protein, 37 aa, Artificial Sequence
  Quasi-synthetic sequence derived from human genome
RISITFFRLFRVMRLVKLLSKGEGIRTLLWTFIKSFQ

SEQ ID NO: 29469 - protein, 37 aa, Artificial Sequence
  Quasi-synthetic sequence derived from human genome
FLLSRKILRLITIRKLFTAIGVLFPSVILVSLPWVRS

SEQ ID NO: 29470 - protein, 37 aa, Artificial Sequence
  Quasi-synthetic sequence derived from human genome
RKMPSLGWLRKCYQQIDRRLRKNLKSLIIVHPSWFIR

SEQ ID NO: 29471 - protein, 37 aa, Artificial Sequence
  Quasi-synthetic sequence derived from human genome
KRKHFRLVLRLVLRGGRELGTFHSRLIKVISKPSQKK

SEQ ID NO: 29472 - protein, 37 aa, Artificial Sequence
  Quasi-synthetic sequence derived from human genome
LPKPKRRRLSKLRTRHCTQAWAIRINPWVEKKKKIKK

SEQ ID NO: 29473 - protein, 37 aa, Artificial Sequence
  Quasi-synthetic sequence derived from human genome
LRRFQGLLLDRRGRLHGQVLRLREVARRLERLRRRSL

SEQ ID NO: 29474 - protein, 37 aa, Artificial Sequence
  Quasi-synthetic sequence derived from human genome
WQQLQFIPFFKYCLLRKSFTCWKKNVRLQGLHRLQKF

SEQ ID NO: 29475 - protein, 37 aa, Artificial Sequence
  Quasi-synthetic sequence derived from human genome
LLLLRWRRPALHRPIKVNLLIPVAYLVFWAFLLVFSF

SEQ ID NO: 29476 - protein, 37 aa, Artificial Sequence
  Quasi-synthetic sequence derived from human genome
FPVSWRTRMRAFHLSLPGGAQLLTYLVKVLKRRTWRR

SEQ ID NO: 29477 - protein, 37 aa, Artificial Sequence
  Quasi-synthetic sequence derived from human genome
EGKMCICFSFCLWFVLQVLIVVLRIVRYRKSSKLIKK

SEQ ID NO: 29478 - protein, 37 aa, Artificial Sequence
  Quasi-synthetic sequence derived from human genome
RLQQGNMRKNMRVLSRTSKFRRLRQLLRRRKKRQQVR

SEQ ID NO: 29479 - protein, 37 aa, Artificial Sequence
  Quasi-synthetic sequence derived from human genome
RDGLLVFFFLIVPLIVCAIFIFIKRDQLWRSYFRKKR

SEQ ID NO: 29480 - protein, 37 aa, Artificial Sequence
  Quasi-synthetic sequence derived from human genome
KMFPKVRESQLLLNVVSQLAKRNLRLLVLGRKHMLRR

SEQ ID NO: 29481 - protein, 37 aa, Artificial Sequence
  Quasi-synthetic sequence derived from human genome
FRQRIILRVWWSTWRQRLGQVRVSRALHASALKHRAL

SEQ ID NO: 29482 - protein, 37 aa, Artificial Sequence
  Quasi-synthetic sequence derived from human genome
KILIHRILTLFPNAIARKLLLMLTFILIFWIIYLASK

SEQ ID NO: 29483 - protein, 37 aa, Artificial Sequence
  Quasi-synthetic sequence derived from human genome
LLLKKLKAWNDIKKVYASQRMRAGKGKMRNRRRIQRR

SEQ ID NO: 29484 - protein, 37 aa, Artificial Sequence
  Quasi-synthetic sequence derived from human genome
NTALLSLVLMAGTFFIAFFLRKFKNSRFFPGRIRRVI

SEQ ID NO: 29485 - protein, 37 aa, Artificial Sequence
  Quasi-synthetic sequence derived from human genome
PAAAAPRASGRCVIAPVRAVLRLRRRVCVLRKRRLLQ

SEQ ID NO: 29486 - protein, 37 aa, Artificial Sequence
  Quasi-synthetic sequence derived from human genome
GALLALALVGVLILFMFRRLRQFRQAQPTPQYRFRKR

SEQ ID NO: 29487 - protein, 37 aa, Artificial Sequence
  Quasi-synthetic sequence derived from human genome
ILVLSLSLAGALFLLAGLVAVALVVRKVKLRNLQKKR

SEQ ID NO: 29488 - protein, 37 aa, Artificial Sequence
  Quasi-synthetic sequence derived from human genome
GLVLRVLRALRILYVMRLARHSLGLQTLGLTVRRCTR

SEQ ID NO: 29489 - protein, 37 aa, Artificial Sequence
  Quasi-synthetic sequence derived from human genome
VLRTFRLLRVLKLVRFMPALRRQLVVLMKTMDNVATF

SEQ ID NO: 29490 - protein, 37 aa, Artificial Sequence
  Quasi-synthetic sequence derived from human genome
VLPKPRMRGLLARRLRNHMAVAFVLSLGVAALYKFRV

SEQ ID NO: 29491 - protein, 37 aa, Artificial Sequence
  Quasi-synthetic sequence derived from human genome
KFKKFDHRYLRKILIRKNLPKSSIVSLYKKLEMKQAI

SEQ ID NO: 29492 - protein, 37 aa, Artificial Sequence
  Quasi-synthetic sequence derived from human genome
KRKAPRGFLKRVFKRKKPQLRLEKSGDLLVHLNCLLF

SEQ ID NO: 29493 - protein, 37 aa, Artificial Sequence
  Quasi-synthetic sequence derived from human genome
GMLWLMERGGLGKPRGPRHRGLLRVRLGRFISRLLLW

SEQ ID NO: 29494 - protein, 37 aa, Artificial Sequence
  Quasi-synthetic sequence derived from human genome
TKKAIKYQSKARRKKWIIIAVSVVLVAIIALIIGLSV

SEQ ID NO: 29495 - protein, 37 aa, Artificial Sequence
  Quasi-synthetic sequence derived from human genome
RLRTVLKNLSLLKLLKSSNRRIQELHKLAKRCWHSLL

SEQ ID NO: 29496 - protein, 37 aa, Artificial Sequence
  Quasi-synthetic sequence derived from human genome
PWRVIGYHVVVWMMAGIPLLLFRWKPLWGVRLRLRPC

SEQ ID NO: 29497 - protein, 37 aa, Artificial Sequence
  Quasi-synthetic sequence derived from human genome
RFFYSLFFPGLIVCGTLCVCLVIVLWGIRLLLQRKKK

SEQ ID NO: 29498 - protein, 37 aa, Artificial Sequence
  Quasi-synthetic sequence derived from human genome
RVITPEDLLFLMRKDKKKLRRLLKYMFIRDYKSKIVK

SEQ ID NO: 29499 - protein, 37 aa, Artificial Sequence
  Quasi-synthetic sequence derived from human genome
LWFQLCRYMNPRARKNCSQIALFRKYRFHFFCSMRCR

SEQ ID NO: 29500 - protein, 37 aa, Artificial Sequence
  Quasi-synthetic sequence derived from human genome
LRSLKLLAQFRQIQIIILVLVRALKSMTFLLMLLLIF

SEQ ID NO: 29501 - protein, 37 aa, Artificial Sequence
  Quasi-synthetic sequence derived from human genome
LSKKTLLRFWLPFGFILILVIFVTGLLLRKPNTYPKM

SEQ ID NO: 29502 - protein, 37 aa, Artificial Sequence
  Quasi-synthetic sequence derived from human genome
KKLDLWRLPPFLIIHLKRFQFVNDQWIKSQKIVRFLR

SEQ ID NO: 29503 - protein, 37 aa, Artificial Sequence
  Quasi-synthetic sequence derived from human genome
RTSIRASLTFNRGFKAGRNMRRKLFGVLRLKCHSLFL

SEQ ID NO: 29504 - protein, 37 aa, Artificial Sequence
  Quasi-synthetic sequence derived from human genome
LKWKRYGRPYFCMLGAIYLLYIICFTMCCIYRPLKPR

SEQ ID NO: 29505 - protein, 37 aa, Artificial Sequence
  Quasi-synthetic sequence derived from human genome
CIKMQKTIRMWLCKRRHKPRIDGLVKVGTLKKRLDKF

SEQ ID NO: 29506 - protein, 37 aa, Artificial Sequence
  Quasi-synthetic sequence derived from human genome
FVVYLKRKTLIRLLFTNKKTTIEKLRCVRPSRPPRGF

SEQ ID NO: 29507 - protein, 37 aa, Artificial Sequence
  Quasi-synthetic sequence derived from human genome
IRAVILHFFRGLLYWKNTLALAAILVLLRVRQCLSLR

SEQ ID NO: 29508 - protein, 37 aa, Artificial Sequence
  Quasi-synthetic sequence derived from human genome
RIGRILRLVRAARGIRTLLFALMMSLPSLFNIGLLLF

SEQ ID NO: 29509 - protein, 37 aa, Artificial Sequence
  Quasi-synthetic sequence derived from human genome
AVPRPRGKLAGLLRTFMRSRPSRQRLRQRGILRQRVF

SEQ ID NO: 29510 - protein, 37 aa, Artificial Sequence
  Quasi-synthetic sequence derived from human genome
LYCSILFLTCISVHRCLGVLRPLRSLRWGRARYARRV

SEQ ID NO: 29511 - protein, 37 aa, Artificial Sequence
  Quasi-synthetic sequence derived from human genome
LRTLFRSRSKRRHRTVKLIFAIVVAYFLSWGPYNFTL

SEQ ID NO: 29512 - protein, 37 aa, Artificial Sequence
  Quasi-synthetic sequence derived from human genome
FRPGKVLRFLHLFGPGKNVPSVWRSARRKRKKHRELI

SEQ ID NO: 29513 - protein, 37 aa, Artificial Sequence
  Quasi-synthetic sequence derived from human genome
LGLLVAGVLVLLVSLGVAMHLCCRRRRARLRFMKQFY

SEQ ID NO: 29514 - protein, 37 aa, Artificial Sequence
  Quasi-synthetic sequence derived from human genome
KKPSSVRALSIVLPIVLLVFLCLGVFLLWKNWRLKNI

SEQ ID NO: 29515 - protein, 37 aa, Artificial Sequence
  Quasi-synthetic sequence derived from human genome
VKIFRCPSPIYFANIGFFRRKLIDAVGFSPLRILRKR

SEQ ID NO: 29516 - protein, 37 aa, Artificial Sequence
  Quasi-synthetic sequence derived from human genome
LALPLVAMAAGGRWVRQQGPRVRRGISRLWLRVLLRL

SEQ ID NO: 29517 - protein, 37 aa, Artificial Sequence
  Quasi-synthetic sequence derived from human genome
ILDPWVYLLLRKILLRKFCQMRKRRLREQFWRPASSG

SEQ ID NO: 29518 - protein, 37 aa, Artificial Sequence
  Quasi-synthetic sequence derived from human genome
ARISSAFFRLFRVMRLIKLLSRAEGVRTLLWTFIKSF

SEQ ID NO: 29519 - protein, 37 aa, Artificial Sequence
  Quasi-synthetic sequence derived from human genome
MAHPFLLLILLCMSLLLFQVIRLYQRRRWMIRALHLF

SEQ ID NO: 29520 - protein, 37 aa, Artificial Sequence
  Quasi-synthetic sequence derived from human genome
FLKITSTRLLCSRLCQQLRSKRKFFGTVPISRLHRRV

SEQ ID NO: 29521 - protein, 37 aa, Artificial Sequence
  Quasi-synthetic sequence derived from human genome
KFNIAVGLILCISLVILTFQWRFYLSFRKLMRWILIL

SEQ ID NO: 29522 - protein, 37 aa, Artificial Sequence
  Quasi-synthetic sequence derived from human genome
ILKKGKRENIVNIRKQREKAAILIQAVWKGFILRKKL

SEQ ID NO: 29523 - protein, 37 aa, Artificial Sequence
  Quasi-synthetic sequence derived from human genome
RRHFRMKLRNLFTKFIRKFGFELVKRLLPEEYHRVLV

SEQ ID NO: 29524 - protein, 37 aa, Artificial Sequence
  Quasi-synthetic sequence derived from human genome
HLFQMPLFLKLFICFIFIRSSPTIVSNKRVSKRKFIP

SEQ ID NO: 29525 - protein, 37 aa, Artificial Sequence
  Quasi-synthetic sequence derived from human genome
QLRLTPGLRKVLFATALGTVALALAAHQLKRRRRRKK

SEQ ID NO: 29526 - protein, 37 aa, Artificial Sequence
  Quasi-synthetic sequence derived from human genome
KLILTFFKAASSQLRALYSMYLRKTKSLNKLLYHLFR

SEQ ID NO: 29527 - protein, 37 aa, Artificial Sequence
  Quasi-synthetic sequence derived from human genome
FIYQLCNNRKSFRLRRRDLLLGFNKRAIDKCWKIRHF

SEQ ID NO: 29528 - protein, 37 aa, Artificial Sequence
  Quasi-synthetic sequence derived from human genome
MALLRLFRMLRIFKLGKYWPTFQILMWSLSNSWVALK

SEQ ID NO: 29529 - protein, 37 aa, Artificial Sequence
  Quasi-synthetic sequence derived from human genome
FMQLQQRLLREKEAKIRKALDRLRKKRHLLRRQRTRR

SEQ ID NO: 29530 - protein, 37 aa, Artificial Sequence
  Quasi-synthetic sequence derived from human genome
VNASLPINPTIIRIMRVLRIARVLKLLKMAVGMRALL

SEQ ID NO: 29531 - protein, 37 aa, Artificial Sequence
  Quasi-synthetic sequence derived from human genome
RRRQAGRRLRYLPTGSFPFLLLLLLLCIQLGGGQKKK

SEQ ID NO: 29532 - protein, 37 aa, Artificial Sequence
  Quasi-synthetic sequence derived from human genome
KNWKIILCLFIIPLVGCGFVSFRKKPVDKHKKLLWYY

SEQ ID NO: 29533 - protein, 37 aa, Artificial Sequence
  Quasi-synthetic sequence derived from human genome
VWAIFRPGTSFGISVLRALRLLRIFKITKYWASLRNL

SEQ ID NO: 29534 - protein, 37 aa, Artificial Sequence
  Quasi-synthetic sequence derived from human genome
PITLGLLVAGVLVLLVSLGVAIHLCCRRRRARLRFMK

SEQ ID NO: 29535 - protein, 37 aa, Artificial Sequence
  Quasi-synthetic sequence derived from human genome
VRFVVRKTVQRSVAKGSRRCKKRMFKFHQMKHIFEIL

SEQ ID NO: 29536 - protein, 37 aa, Artificial Sequence
  Quasi-synthetic sequence derived from human genome
WFQFYLTFPLIFGLFIILLVIFLIWRCFLRNKTRRQT

SEQ ID NO: 29537 - protein, 37 aa, Artificial Sequence
  Quasi-synthetic sequence derived from human genome
YIMNKDLLRRVLVLMNSKHTFLALCALRFMRRIIGLK

SEQ ID NO: 29538 - protein, 37 aa, Artificial Sequence
  Quasi-synthetic sequence derived from human genome
RRELSLGRKKAPHRLCGRFSRISMKLPRIPLRRQKLP

SEQ ID NO: 29539 - protein, 37 aa, Artificial Sequence
  Quasi-synthetic sequence derived from human genome
RNVKFPLPIYKSKKGWTAYKLQLFKMFPIILAILVSW

SEQ ID NO: 29540 - protein, 37 aa, Artificial Sequence
  Quasi-synthetic sequence derived from human genome
KTLKYLLLGRWRKKHLTFRILNLPSTLPPHTARAALR

SEQ ID NO: 29541 - protein, 37 aa, Artificial Sequence
  Quasi-synthetic sequence derived from human genome
RAVKILKKKKLRRIPNGEANVKKEIQLLRRLRHKNVI

SEQ ID NO: 29542 - protein, 37 aa, Artificial Sequence
  Quasi-synthetic sequence derived from human genome
RRYFREATMKMAVMIFKRGVFESRRKNKAVFRPKIRI

SEQ ID NO: 29543 - protein, 37 aa, Artificial Sequence
  Quasi-synthetic sequence derived from human genome
AVILAFLAAVAAVLISLMWVCNKCAYKFQRKRRHKLK

SEQ ID NO: 29544 - protein, 37 aa, Artificial Sequence
  Quasi-synthetic sequence derived from human genome
TSAAKLKRKYWWKNLKMMIILGVICAIILIIIIVYFS

SEQ ID NO: 29545 - protein, 37 aa, Artificial Sequence
  Quasi-synthetic sequence derived from human genome
RFLCGFLVPVLIITACYLTIVCKLQRNRLAKTKKPFK

SEQ ID NO: 29546 - protein, 37 aa, Artificial Sequence
  Quasi-synthetic sequence derived from human genome
KRLNIRKVIPYIASQFRKDKIWLRRTKPSKRQYQICL

SEQ ID NO: 29547 - protein, 37 aa, Artificial Sequence
  Quasi-synthetic sequence derived from human genome
RRRRRAKITGRERKAMRVLPVVVGAFLLCWTPFFVVH

SEQ ID NO: 29548 - protein, 37 aa, Artificial Sequence
  Quasi-synthetic sequence derived from human genome
ALVLPSIVILGKIILFLPCISRKLKRIKKGWEKSQFL

SEQ ID NO: 29549 - protein, 37 aa, Artificial Sequence
  Quasi-synthetic sequence derived from human genome
RVAKMGLILAIRSILLVIPFPFTLRRLKYCQKNLLSH

SEQ ID NO: 29550 - protein, 37 aa, Artificial Sequence
  Quasi-synthetic sequence derived from human genome
AFLALFKAAEFAKLSIKWMIKIRKRYLKRRGQATSHI

SEQ ID NO: 29551 - protein, 37 aa, Artificial Sequence
  Quasi-synthetic sequence derived from human genome
KYLKVFYKFLNSNRHTIRHTGKKCFKCKKCVKSFCIR

SEQ ID NO: 29552 - protein, 37 aa, Artificial Sequence
  Quasi-synthetic sequence derived from human genome
RRRFVQQKRAAITLQHYFRTWQTRKQFLLYRKAAVVL

SEQ ID NO: 29553 - protein, 37 aa, Artificial Sequence
  Quasi-synthetic sequence derived from human genome
RRPRGSTARTLLRLLLRLLLFLGLLALALHFLGLQPL

SEQ ID NO: 29554 - protein, 37 aa, Artificial Sequence
  Quasi-synthetic sequence derived from human genome
LKIKLAVRMDKPAHMKHSGYLYALGQKVWKRWKKRYF

SEQ ID NO: 29555 - protein, 37 aa, Artificial Sequence
  Quasi-synthetic sequence derived from human genome
LLLIKKVTWTMNGLMLPTDIKRRKTKPVLSIRMKKLT

SEQ ID NO: 29556 - protein, 37 aa, Artificial Sequence
  Quasi-synthetic sequence derived from human genome
ILVGVLLLFVLLLVVRRRRREQRLKRLRDAKSLAEML

SEQ ID NO: 29557 - protein, 37 aa, Artificial Sequence
  Quasi-synthetic sequence derived from human genome
ALCTLRGRRCHCLPFPKRGMQRWMLPLRRGARLLPLA

SEQ ID NO: 29558 - protein, 37 aa, Artificial Sequence
  Quasi-synthetic sequence derived from human genome
IYSSVVSFYLPFGVTVLVYARIYVVLKQRRRKRILTR

SEQ ID NO: 29559 - protein, 37 aa, Artificial Sequence
  Quasi-synthetic sequence derived from human genome
MMFVRNDCKVFRFCKSKCHKNFKKKRNPRKVRWTKAF

SEQ ID NO: 29560 - protein, 37 aa, Artificial Sequence
  Quasi-synthetic sequence derived from human genome
AKLLFTPQHKMLRLRLPNLKMVRLRVSFSAVVFKAVS

SEQ ID NO: 29561 - protein, 37 aa, Artificial Sequence
  Quasi-synthetic sequence derived from human genome
KYHRFLGRHFPRFYVLYTIFMKGLQMLWADAKKARRI

SEQ ID NO: 29562 - protein, 37 aa, Artificial Sequence
  Quasi-synthetic sequence derived from human genome
VFPVVMYFWKRFCFWKATRSYLQYRGKKFKDRKSPPK

SEQ ID NO: 29563 - protein, 37 aa, Artificial Sequence
  Quasi-synthetic sequence derived from human genome
RGYVVGWIIAISLLVGILIFLLLAVLLWKMGFFRRRY

SEQ ID NO: 29564 - protein, 37 aa, Artificial Sequence
  Quasi-synthetic sequence derived from human genome
AKSNTVYNPVIYVFMIRKFRRSLLQLLCLRLLRCQRP

SEQ ID NO: 29565 - protein, 37 aa, Artificial Sequence
  Quasi-synthetic sequence derived from human genome
CWKFFIEKVRRQLKVILCFSPVGSVLRVRARKFPAVV

SEQ ID NO: 29566 - protein, 37 aa, Artificial Sequence
  Quasi-synthetic sequence derived from human genome
LSVERYLAICRPLRARVLVTRRRVRALIAVLWAVALL

SEQ ID NO: 29567 - protein, 37 aa, Artificial Sequence
  Quasi-synthetic sequence derived from human genome
TSAAKLKRKYWWKNCKMWAIGITVLVIFIIIIIVWVV

SEQ ID NO: 29568 - protein, 37 aa, Artificial Sequence
  Quasi-synthetic sequence derived from human genome
LRKNLKSLIIVHPSWFIRTLLAVTRPFISSKFSQKIR

SEQ ID NO: 29569 - protein, 37 aa, Artificial Sequence
  Quasi-synthetic sequence derived from human genome
VKTVRFQTPGRFSWFCKRRRAFWHTPRLPTLPKRVPR

SEQ ID NO: 29570 - protein, 37 aa, Artificial Sequence
  Quasi-synthetic sequence derived from human genome
LRTAMRRQMRRHASRRGPSRRRLGRLWNRLFHRPRAP

SEQ ID NO: 29571 - protein, 37 aa, Artificial Sequence
  Quasi-synthetic sequence derived from human genome
RRIVVSRGRLRRLLWIGFTLTAVALILWQCALLVFSF

SEQ ID NO: 29572 - protein, 37 aa, Artificial Sequence
  Quasi-synthetic sequence derived from human genome
MKPPISRAKMILITKAAIKAIKLYKHVVQIVEKFIKK

SEQ ID NO: 29573 - protein, 37 aa, Artificial Sequence
  Quasi-synthetic sequence derived from human genome
GFILPVLGAVLALLFLLLVLLLLVRKKRKIKEPLLLP

SEQ ID NO: 29574 - protein, 37 aa, Artificial Sequence
  Quasi-synthetic sequence derived from human genome
TSLFLLQYFVPLGFILICYLKIVICLRRRNAKVDKKK

SEQ ID NO: 29575 - protein, 37 aa, Artificial Sequence
  Quasi-synthetic sequence derived from human genome
AVLPLALGLAITALLLLMVACRLRLVKQKLKKARPIT

SEQ ID NO: 29576 - protein, 37 aa, Artificial Sequence
  Quasi-synthetic sequence derived from human genome
RLKIKQILPTIYKRKNLSLFLSISLLIFWGSSLLGAR

SEQ ID NO: 29577 - protein, 37 aa, Artificial Sequence
  Quasi-synthetic sequence derived from human genome
HNLFFLLSLGIILFCYVEILRTLFRSRSKRRHRTVKL

SEQ ID NO: 29578 - protein, 37 aa, Artificial Sequence
  Quasi-synthetic sequence derived from human genome
WRRRHCCFAKMTWNAKRSLFRTHLIGVLSLVFLFAMF

SEQ ID NO: 29579 - protein, 37 aa, Artificial Sequence
  Quasi-synthetic sequence derived from human genome
RPKRYFTIVIISSSLLLGLIVLLLISYVMWKAGFFKR

SEQ ID NO: 29580 - protein, 37 aa, Artificial Sequence
  Quasi-synthetic sequence derived from human genome
PVKKNTLKKYKIACIVLLALLVIMSLGLGLGLGLRKL

SEQ ID NO: 29581 - protein, 37 aa, Artificial Sequence
  Quasi-synthetic sequence derived from human genome
FFIRCGIFLILEKLKIITYRNLFKKVYLLLKTHQLSL

SEQ ID NO: 29582 - protein, 37 aa, Artificial Sequence
  Quasi-synthetic sequence derived from human genome
FNRYLTRRRRIEIAHALCLTERQIKIWFQNRRMKWKK

SEQ ID NO: 29583 - protein, 37 aa, Artificial Sequence
  Quasi-synthetic sequence derived from human genome
FSGSKGKDINTIKSLRVLRVLRPLKTIKRLPKLKAVF

SEQ ID NO: 29584 - protein, 37 aa, Artificial Sequence
  Quasi-synthetic sequence derived from human genome
FRGWVALVLHLRAHSAAKRPIACPKCERRFWRRKQLR

SEQ ID NO: 29585 - protein, 37 aa, Artificial Sequence
  Quasi-synthetic sequence derived from human genome
LHILFSLYTRTLYLRYRPKVKFLFGIWPVILFEPLRK

SEQ ID NO: 29586 - protein, 37 aa, Artificial Sequence
  Quasi-synthetic sequence derived from human genome
PQRPIGKAKPKKQSKKKVPFWNVQNKIILFTVFLFIL

SEQ ID NO: 29587 - protein, 37 aa, Artificial Sequence
  Quasi-synthetic sequence derived from human genome
RHPAWWFMSVKVKLKRKKRQKTPNRKLPRRGAPTLRP

SEQ ID NO: 29588 - protein, 37 aa, Artificial Sequence
  Quasi-synthetic sequence derived from human genome
YCYFRIIQTLFSCKNHKKAKAIKLILLVVIVFFLFWT

SEQ ID NO: 29589 - protein, 37 aa, Artificial Sequence
  Quasi-synthetic sequence derived from human genome
VRLWKVLALVFGFATCATLFFILRKQYLQRQERLRLK

SEQ ID NO: 29590 - protein, 37 aa, Artificial Sequence
  Quasi-synthetic sequence derived from human genome
LLKIKNTFCLWKRLIKLKDNHCEQLRVKIRKLKNKAS

SEQ ID NO: 29591 - protein, 37 aa, Artificial Sequence
  Quasi-synthetic sequence derived from human genome
KFIRIFQLSNNIRSVVLRHCKKRQSHLRLTLKNNVFL

SEQ ID NO: 29592 - protein, 37 aa, Artificial Sequence
  Quasi-synthetic sequence derived from human genome
LRRQWKCVQRRCLRHLAHRLRRRHQRCQRRTPLAVAP

SEQ ID NO: 29593 - protein, 37 aa, Artificial Sequence
  Quasi-synthetic sequence derived from human genome
FRSWGYVLLIVLFCLFIFVLIYVRVFRKSRRSLNSQP

SEQ ID NO: 29594 - protein, 37 aa, Artificial Sequence
  Quasi-synthetic sequence derived from human genome
FRILRIFKLIAPKLLQIIDKRMSHQKTFWYGILKGYV

SEQ ID NO: 29595 - protein, 37 aa, Artificial Sequence
  Quasi-synthetic sequence derived from human genome
VLAKKMLRKALKLLNRIFPYNLISLFLHIHVEKNRHF

SEQ ID NO: 29596 - protein, 37 aa, Artificial Sequence
  Quasi-synthetic sequence derived from human genome
RKFASIARNQVRKKRQMAARERKVTRTIFAILLAFIL

SEQ ID NO: 29597 - protein, 37 aa, Artificial Sequence
  Quasi-synthetic sequence derived from human genome
WAGYRPGPVRRRGKVELIKFVRVQWRRPQVEWRRRRW

SEQ ID NO: 29598 - protein, 37 aa, Artificial Sequence
  Quasi-synthetic sequence derived from human genome
PARPWPRWLGVAALGLAAVALGTVAWRRAWPRRRRRL

SEQ ID NO: 29599 - protein, 37 aa, Artificial Sequence
  Quasi-synthetic sequence derived from human genome
KIQSWFRGCQVRAYIRHLNRIVTIIQKWWRSFLGRKQ

SEQ ID NO: 29600 - protein, 37 aa, Artificial Sequence
  Quasi-synthetic sequence derived from human genome
IFSKVRIFGLKKRRLRRQDPQLKGIVTRLYCRQGYYL

SEQ ID NO: 29601 - protein, 37 aa, Artificial Sequence
  Quasi-synthetic sequence derived from human genome
MRIFIQAKRVKTKHLCYCLYRPRKYLYVTSSFKGAFK

SEQ ID NO: 29602 - protein, 37 aa, Artificial Sequence
  Quasi-synthetic sequence derived from human genome
TWLAIILLIFISLFPEILLIVLKNVRRRSARVTKRLP

SEQ ID NO: 29603 - protein, 37 aa, Artificial Sequence
  Quasi-synthetic sequence derived from human genome
FNRYLTRRRRIEIAHALCLSERQIKIWFQNRRMKWKK

SEQ ID NO: 29604 - protein, 37 aa, Artificial Sequence
  Quasi-synthetic sequence derived from human genome
INPMCYALCNKAFRDTFRLLLLCRWDKRRWRKIPKRP

SEQ ID NO: 29605 - protein, 37 aa, Artificial Sequence
  Quasi-synthetic sequence derived from human genome
RYYYNKRILHKTKGKRFTYKFNFNKLVMPNYPFINIR

SEQ ID NO: 29606 - protein, 37 aa, Artificial Sequence
  Quasi-synthetic sequence derived from human genome
RHLGVVIGILVAVILLLLLLLLLFLILRHRRQGKHWT

SEQ ID NO: 29607 - protein, 37 aa, Artificial Sequence
  Quasi-synthetic sequence derived from human genome
IRRLLILILKIGRRWTELIRTMESRVLLRTFCLIFGL

SEQ ID NO: 29608 - protein, 37 aa, Artificial Sequence
  Quasi-synthetic sequence derived from human genome
YRATICAKHKLYQFLHLRKAAITIQSSYRRLMVKKKL

SEQ ID NO: 29609 - protein, 37 aa, Artificial Sequence
  Quasi-synthetic sequence derived from human genome
FILGFLVPLTIICLCYLFIIIKVKSSGIRVGSSKRKK

SEQ ID NO: 29610 - protein, 37 aa, Artificial Sequence
  Quasi-synthetic sequence derived from human genome
KAGGVAMYAVSWCFMFSIWRFAWRKSIKKYHAWRSRR

SEQ ID NO: 29611 - protein, 37 aa, Artificial Sequence
  Quasi-synthetic sequence derived from human genome
KNLRKQYRNVKKMTAKELVKVLFSFFWMLFVGLFQLL

SEQ ID NO: 29612 - protein, 37 aa, Artificial Sequence
  Quasi-synthetic sequence derived from human genome
AFRVAKKRAPKVLGTTLVVGLLAGVGYFAFMLFRKRL

SEQ ID NO: 29613 - protein, 37 aa, Artificial Sequence
  Quasi-synthetic sequence derived from human genome
RCCVRALSIQRLWYFWFLLMMGVLFCCGAGFFIRRRM

SEQ ID NO: 29614 - protein, 37 aa, Artificial Sequence
  Quasi-synthetic sequence derived from human genome
KIRRKNCPACRLRKCCQAGMVLGGRKFKKFNKVRVVR

SEQ ID NO: 29615 - protein, 37 aa, Artificial Sequence
  Quasi-synthetic sequence derived from human genome
LFGLEIRMRRIVFAGVILFRLLGVILFRLLGVILFGR

SEQ ID NO: 29616 - protein, 37 aa, Artificial Sequence
  Quasi-synthetic sequence derived from human genome
FKNLFYRTYMLFKNASGKRRFLLCLLLFTVITYFFVV

SEQ ID NO: 29617 - protein, 37 aa, Artificial Sequence
  Quasi-synthetic sequence derived from human genome
LKIVILGLVLPLLVMVICYSGILKTLLRCRNEKKRHR

SEQ ID NO: 29618 - protein, 37 aa, Artificial Sequence
  Quasi-synthetic sequence derived from human genome
AILAKISRPKKRAKTITFSKNAVISKRGGKLCLLIRV

SEQ ID NO: 29619 - protein, 37 aa, Artificial Sequence
  Quasi-synthetic sequence derived from human genome
ALLLWKMRLFQRQWANSFFQGLQQRMLQRSLRWWHLR

SEQ ID NO: 29620 - protein, 37 aa, Artificial Sequence
  Quasi-synthetic sequence derived from human genome
RLLFAKLFGHLTSARRARKSEVPHFRLKKVQNIKMWL

SEQ ID NO: 29621 - protein, 37 aa, Artificial Sequence
  Quasi-synthetic sequence derived from human genome
VNVCPRLWMWSWKHIRKHRQKVKQYKELYKKKLTSKK

SEQ ID NO: 29622 - protein, 37 aa, Artificial Sequence
  Quasi-synthetic sequence derived from human genome
RSKKAVWHKLLSKQRKRAVVACFRMAPLYNLPRHRAV

SEQ ID NO: 29623 - protein, 37 aa, Artificial Sequence
  Quasi-synthetic sequence derived from human genome
KGIDSEVYKTARALRIVRFTKILSLLRLLRLSRLIRY

SEQ ID NO: 29624 - protein, 37 aa, Artificial Sequence
  Quasi-synthetic sequence derived from human genome
LWALWPRWLADKMLPLLGAVLLQKREKRGPLWRHWRR

SEQ ID NO: 29625 - protein, 37 aa, Artificial Sequence
  Quasi-synthetic sequence derived from human genome
KRALKVKQAMMQLYVLKLLKVQTKYLGRQWRKSNMKT

SEQ ID NO: 29626 - protein, 37 aa, Artificial Sequence
  Quasi-synthetic sequence derived from human genome
TNGNKKIWWIIRGPMMLCVTVNFFIFLKILKLLISKL

SEQ ID NO: 29627 - protein, 37 aa, Artificial Sequence
  Quasi-synthetic sequence derived from human genome
LKKHTLIRFLPRPIRQQLLYKRRYIFSVVENLQRLCY

SEQ ID NO: 29628 - protein, 37 aa, Artificial Sequence
  Quasi-synthetic sequence derived from human genome
RKKFMITPKLIRMVTVMQAHVRGWLERKRLQRVMTKA

SEQ ID NO: 29629 - protein, 37 aa, Artificial Sequence
  Quasi-synthetic sequence derived from human genome
RIKRFLAKKQKQNRPIPQWIRMKTGNKIRYNSKRRHW

SEQ ID NO: 29630 - protein, 37 aa, Artificial Sequence
  Quasi-synthetic sequence derived from human genome
SWLVWGVILFVYLVIRALRLWRTAKLQVTLKKYSVHL

SEQ ID NO: 29631 - protein, 37 aa, Artificial Sequence
  Quasi-synthetic sequence derived from human genome
RGRALGGRAVRSRRAIAVLSRWPAFPAFRAFLTFLYR

SEQ ID NO: 29632 - protein, 37 aa, Artificial Sequence
  Quasi-synthetic sequence derived from human genome
VIRIRGINGVSPKVRKVLQLLRLRQIFNGTFVKLNKA

SEQ ID NO: 29633 - protein, 37 aa, Artificial Sequence
  Quasi-synthetic sequence derived from human genome
HLPIYRHLRRFILSVIVFGSIVLLMLWLPIRIIKSVL

SEQ ID NO: 29634 - protein, 37 aa, Artificial Sequence
  Quasi-synthetic sequence derived from human genome
RVRFTKRKQKVPGFPKRFTVKPVVLGFPYFHSGRHFW

SEQ ID NO: 29635 - protein, 37 aa, Artificial Sequence
  Quasi-synthetic sequence derived from human genome
YLLLLAFLQRRQRRRQDSRVVARSVRILVASFFLCWF

SEQ ID NO: 29636 - protein, 37 aa, Artificial Sequence
  Quasi-synthetic sequence derived from human genome
MVLKTLTKPVTLSRSKINKTKVLKMIFVHLIIFCFCF

SEQ ID NO: 29637 - protein, 37 aa, Artificial Sequence
  Quasi-synthetic sequence derived from human genome
RNLVLKNRSLKLQKMKYRPPKTKFFFTVIPQPIFLSP

SEQ ID NO: 29638 - protein, 37 aa, Artificial Sequence
  Quasi-synthetic sequence derived from human genome
KVIKYIWRIGTDGRTVRRTMNIVPRTKVKTIKMFLIL

SEQ ID NO: 29639 - protein, 37 aa, Artificial Sequence
  Quasi-synthetic sequence derived from human genome
RRRKELFRKKNKAAAVIQRAWRSYQLRKHLSHLRHMK

SEQ ID NO: 29640 - protein, 37 aa, Artificial Sequence
  Quasi-synthetic sequence derived from human genome
LRKRRRLLSIIVVLVVTFALCWMPYHLVKTLYMLGSL

SEQ ID NO: 29641 - protein, 37 aa, Artificial Sequence
  Quasi-synthetic sequence derived from human genome
YLLIVVKVRAAGVRVGCVRRRSERKVTRMVLVVVLVF

SEQ ID NO: 29642 - protein, 37 aa, Artificial Sequence
  Quasi-synthetic sequence derived from human genome
CLLRLRNKLRGVQRNLAGSLVRLSALVKSKQKAYFIL

SEQ ID NO: 29643 - protein, 37 aa, Artificial Sequence
  Quasi-synthetic sequence derived from human genome
MLLRKRYRHRPCRLQFLLLLLMLGCVLMMVAMLHPPH

SEQ ID NO: 29644 - protein, 37 aa, Artificial Sequence
  Quasi-synthetic sequence derived from human genome
FFILRRKPVEQKKIFTIQGCYPVIRCLLRRRGWVEKK

SEQ ID NO: 29645 - protein, 37 aa, Artificial Sequence
  Quasi-synthetic sequence derived from human genome
LRKNLKSFIIVHPSWFIRTILAVTRPFISSKFSSKIK

SEQ ID NO: 29646 - protein, 37 aa, Artificial Sequence
  Quasi-synthetic sequence derived from human genome
RWIVGKVIGTKMQKTAKVRVTRLVLDPYLLKYFNKRK

SEQ ID NO: 29647 - protein, 37 aa, Artificial Sequence
  Quasi-synthetic sequence derived from human genome
ALKEGLRAWKRIFWRQILLTLGLLGLFLYGLPKFRHL

SEQ ID NO: 29648 - protein, 37 aa, Artificial Sequence
  Quasi-synthetic sequence derived from human genome
PLRAPALRRLLPPLLLLLLSLPPRARAKYVRGNLSSK

SEQ ID NO: 29649 - protein, 37 aa, Artificial Sequence
  Quasi-synthetic sequence derived from human genome
KKKPVPVLLGSLLKRKMLPRAALLVTTRPRALRDLQL

SEQ ID NO: 29650 - protein, 37 aa, Artificial Sequence
  Quasi-synthetic sequence derived from human genome
MSAALPINPTIIRIMRVLRIARVLKLLKMATGMRALL

SEQ ID NO: 29651 - protein, 37 aa, Artificial Sequence
  Quasi-synthetic sequence derived from human genome
LRILSKYHRFISFTLYLIGFCMFVLSLVKKHYRLQFY

SEQ ID NO: 29652 - protein, 37 aa, Artificial Sequence
  Quasi-synthetic sequence derived from human genome
LLLGVARSLWMLLKLRQRLRSPTAPFTSPLPRGKRRA

SEQ ID NO: 29653 - protein, 37 aa, Artificial Sequence
  Quasi-synthetic sequence derived from human genome
RMRYKRTKAALTIIRYYRRYKVKSYIHEVARRFHGVK

SEQ ID NO: 29654 - protein, 37 aa, Artificial Sequence
  Quasi-synthetic sequence derived from human genome
WRRVLAQRKLLMLKKEKLEKVQNKAASLIQAMWRRYR

SEQ ID NO: 29655 - protein, 37 aa, Artificial Sequence
  Quasi-synthetic sequence derived from human genome
IKIYIVLRRRRKRVNTKRSSRAFRAHLRAPLKGNCTH

SEQ ID NO: 29656 - protein, 37 aa, Artificial Sequence
  Quasi-synthetic sequence derived from human genome
TKLLERAGLVLRLLRALRVLYVMRLARHSLGLRSLGL

SEQ ID NO: 29657 - protein, 37 aa, Artificial Sequence
  Quasi-synthetic sequence derived from human genome
IRHMIRKNKYRPDLRMAAIRRASAILRSQKPVMVKRK

SEQ ID NO: 29658 - protein, 37 aa, Artificial Sequence
  Quasi-synthetic sequence derived from human genome
QAKLLAKKRVVRMLLVIVVLFFLCWLPVYSANTWRAF

SEQ ID NO: 29659 - protein, 37 aa, Artificial Sequence
  Quasi-synthetic sequence derived from human genome
GFMVFFLINPTKTFYYKSRFWLLKLLFRVFTAPFHKV

SEQ ID NO: 29660 - protein, 37 aa, Artificial Sequence
  Quasi-synthetic sequence derived from human genome
LAILIMRLKMFLTPHMCVMASLICSRQLFGWLFRRVR

SEQ ID NO: 29661 - protein, 37 aa, Artificial Sequence
  Quasi-synthetic sequence derived from human genome
RLRNAKIYVERAVKQKKIFTIQGCYPVIRCLLRRRGW

SEQ ID NO: 29662 - protein, 37 aa, Artificial Sequence
  Quasi-synthetic sequence derived from human genome
FKFLQRLLLVHGRWSYLRMCKFLCYFFYKNFAFTMVH

SEQ ID NO: 29663 - protein, 37 aa, Artificial Sequence
  Quasi-synthetic sequence derived from human genome
RLDLACSLSWNVIRYSLQKLRLVRWLLKKVFQCRRAT

SEQ ID NO: 29664 - protein, 37 aa, Artificial Sequence
  Quasi-synthetic sequence derived from human genome
VKGLIQGAIYAGIVIALLFLCLLPLIVKHIRKKQAKK

SEQ ID NO: 29665 - protein, 37 aa, Artificial Sequence
  Quasi-synthetic sequence derived from human genome
FRRLKAHNLCRQIRAACVIQSYWRMRQDRVRFLNLKK

SEQ ID NO: 29666 - protein, 37 aa, Artificial Sequence
  Quasi-synthetic sequence derived from human genome
PRRGRLARCWARCRDWRRMALVSALLLMLFCVALWPV

SEQ ID NO: 29667 - protein, 37 aa, Artificial Sequence
  Quasi-synthetic sequence derived from human genome
MASAGGAKILGVLRVLRLLRTLRPLRVISRAPGLKLV

SEQ ID NO: 29668 - protein, 37 aa, Artificial Sequence
  Quasi-synthetic sequence derived from human genome
IFVFFRKLTTIFPLNWKYRKALSLGCQRVTLHKNMFL

SEQ ID NO: 29669 - protein, 37 aa, Artificial Sequence
  Quasi-synthetic sequence derived from human genome
SCLVLLALCLLLPLLLLGGWKRWRRGRAARHVVAVVL

SEQ ID NO: 29670 - protein, 37 aa, Artificial Sequence
  Quasi-synthetic sequence derived from human genome
LMIRRLRGVRLLSGSREKDRNLRRITRLVLVVVAVFV

SEQ ID NO: 29671 - protein, 37 aa, Artificial Sequence
  Quasi-synthetic sequence derived from human genome
RLLRAQSLEWFYNNVKSRFKRFGSAKVLKNLYRKHRL

SEQ ID NO: 29672 - protein, 37 aa, Artificial Sequence
  Quasi-synthetic sequence derived from human genome
YLGLSFSWVLLALALLAWCRRSRGLKALRLCRALALL

SEQ ID NO: 29673 - protein, 37 aa, Artificial Sequence
  Quasi-synthetic sequence derived from human genome
YRRWMIRKRMREMHRAATFIQSTFRMHRLHMRYQALK

SEQ ID NO: 29674 - protein, 37 aa, Artificial Sequence
  Quasi-synthetic sequence derived from human genome
QYLGLARKKSGILLLTLVSFLIFILFIIVQLFIMKLR

SEQ ID NO: 29675 - protein, 37 aa, Artificial Sequence
  Quasi-synthetic sequence derived from human genome
FRTHHTGLLSVLAMFFLLVLILSSVFLFRLFKRRQGR

SEQ ID NO: 29676 - protein, 37 aa, Artificial Sequence
  Quasi-synthetic sequence derived from human genome
GFFGPLLVICLCYLLIVVKVRSAGRRVWAPSCQRRRR

SEQ ID NO: 29677 - protein, 37 aa, Artificial Sequence
  Quasi-synthetic sequence derived from human genome
MGKVVQILRLMRIFRILKLARHSVGLRSLGATLRHSY

SEQ ID NO: 29678 - protein, 37 aa, Artificial Sequence
  Quasi-synthetic sequence derived from human genome
WRLSVRCGGWPLRWLMENGFLPDPPRIRYRKKKRILK

SEQ ID NO: 29679 - protein, 37 aa, Artificial Sequence
  Quasi-synthetic sequence derived from human genome
KNAVISKRGGKLCLLIRVANLRKSLLIGSHIYGKLLK

SEQ ID NO: 29680 - protein, 37 aa, Artificial Sequence
  Quasi-synthetic sequence derived from human genome
KMRAVALRAGWQQRRRSEKKITRLVLMVVVVFVLCWM

SEQ ID NO: 29681 - protein, 37 aa, Artificial Sequence
  Quasi-synthetic sequence derived from human genome
MKFHKKVGKLGVLDKKTIKTINKMKTLKRKNILNQIL

SEQ ID NO: 29682 - protein, 37 aa, Artificial Sequence
  Quasi-synthetic sequence derived from human genome
FRYLQRLLLVHGRWSYFRMCKFLCYFFYKNFAFTLVH

SEQ ID NO: 29683 - protein, 37 aa, Artificial Sequence
  Quasi-synthetic sequence derived from human genome
FFLSRRRRARSSVCRRKVAQAREKRFTFVLAVVMGVF

SEQ ID NO: 29684 - protein, 37 aa, Artificial Sequence
  Quasi-synthetic sequence derived from human genome
KTGSFLNRLGKLLLHLFMVLCLTLFLNNIIKKILNLK

SEQ ID NO: 29685 - protein, 37 aa, Artificial Sequence
  Quasi-synthetic sequence derived from human genome
RPLRPLRLASRGLHAFLAAFLSGLLLALSCWGGRRRR

SEQ ID NO: 29686 - protein, 37 aa, Artificial Sequence
  Quasi-synthetic sequence derived from human genome
AGVAVYRKYICTSFYPWVNILKISFKRKKFFIHQRQK

SEQ ID NO: 29687 - protein, 37 aa, Artificial Sequence
  Quasi-synthetic sequence derived from human genome
LVKRLHKVLRPFLLRRVKVDVEKQMPKKYEHVIRCRL

SEQ ID NO: 29688 - protein, 37 aa, Artificial Sequence
  Quasi-synthetic sequence derived from human genome
LGLSRMSNLSVLRSFRLLRVFKLAKSWPTLNTLIKII

SEQ ID NO: 29689 - protein, 37 aa, Artificial Sequence
  Quasi-synthetic sequence derived from human genome
LLKSFLQERLGIHLIRRKIVKPKHHVLMSRKESWKVK

SEQ ID NO: 29690 - protein, 37 aa, Artificial Sequence
  Quasi-synthetic sequence derived from human genome
LKSIKYLICTRYKWLIIKIVLALLGLLMLGLFLYSLP

SEQ ID NO: 29691 - protein, 37 aa, Artificial Sequence
  Quasi-synthetic sequence derived from human genome
LRKNLKSLIIVHPSWFIRTVLAISRPFISVKFINKIQ

SEQ ID NO: 29692 - protein, 37 aa, Artificial Sequence
  Quasi-synthetic sequence derived from human genome
ILASQKVKKIWQKQFRWPKNRLQILKFCKAREDLLKI

SEQ ID NO: 29693 - protein, 37 aa, Artificial Sequence
  Quasi-synthetic sequence derived from human genome
KWLLIGSLLFGVLFLVIGLVLLGRILSESLRRKRYSR

SEQ ID NO: 29694 - protein, 37 aa, Artificial Sequence
  Quasi-synthetic sequence derived from human genome
RHLGVVIGILVAVVLLLLLLLLLFLILRHRRQGKHWT

SEQ ID NO: 29695 - protein, 37 aa, Artificial Sequence
  Quasi-synthetic sequence derived from human genome
IKSSFLLKFIRKMTSRHWCAVPILFLSKALANVPRHK

SEQ ID NO: 29696 - protein, 37 aa, Artificial Sequence
  Quasi-synthetic sequence derived from human genome
VWFHVLFYLAVGIMFLVNTVLWVTIRKELKRKKKWNL

SEQ ID NO: 29697 - protein, 37 aa, Artificial Sequence
  Quasi-synthetic sequence derived from human genome
KLQRNRLAKTKKPFKIIVTIIITFFLCWCPYHTLNLL

SEQ ID NO: 29698 - protein, 37 aa, Artificial Sequence
  Quasi-synthetic sequence derived from human genome
RPVILRLPNRRALRLRASFSQPLFQAVAAICRLLSIR

SEQ ID NO: 29699 - protein, 37 aa, Artificial Sequence
  Quasi-synthetic sequence derived from human genome
RRKFLQMKRRKYGFIYKTHLFGRPTVRVMGADNVRRI

SEQ ID NO: 29700 - protein, 37 aa, Artificial Sequence
  Quasi-synthetic sequence derived from human genome
LYKKGVYLSHTGGKMLFWVLGLLILCGFLWTRKGKLK

SEQ ID NO: 29701 - protein, 37 aa, Artificial Sequence
  Quasi-synthetic sequence derived from human genome
IIRRAKKIPKINILHKQTSGYIVYGLFMLHTKIVNRK

SEQ ID NO: 29702 - protein, 37 aa, Artificial Sequence
  Quasi-synthetic sequence derived from human genome
KLHRVLKVFLSRTAQRIPYMTGGRVMRMLAVILLVVF

SEQ ID NO: 29703 - protein, 37 aa, Artificial Sequence
  Quasi-synthetic sequence derived from human genome
FVRLGPMALAFKVRGLLDCKHSWKRLKDIRKIFPGKK

SEQ ID NO: 29704 - protein, 37 aa, Artificial Sequence
  Quasi-synthetic sequence derived from human genome
RKILLLQSWFRMVLERRHFLQMKRAAVTIQACWRSYR

SEQ ID NO: 29705 - protein, 37 aa, Artificial Sequence
  Quasi-synthetic sequence derived from human genome
YLRVATWNQILDPWVYILFRRAVLRRLQPRLSTRPRR

SEQ ID NO: 29706 - protein, 37 aa, Artificial Sequence
  Quasi-synthetic sequence derived from human genome
LVRNRRFQLCRCMNPRARKNRSQIALFQKLRFQFFCS

SEQ ID NO: 29707 - protein, 37 aa, Artificial Sequence
  Quasi-synthetic sequence derived from human genome
LRRQLQRQHKCAIIIQSYYRMHVQQKKWKIMKKAALL

SEQ ID NO: 29708 - protein, 37 aa, Artificial Sequence
  Quasi-synthetic sequence derived from human genome
MRLQRKAVISLQSYFRMRKARQYYLKMYKAIIVIQNY

SEQ ID NO: 29709 - protein, 37 aa, Artificial Sequence
  Quasi-synthetic sequence derived from human genome
LSRALLALRTRHIKAAGGIERFRARGGLRPLLALLRR

SEQ ID NO: 29710 - protein, 37 aa, Artificial Sequence
  Quasi-synthetic sequence derived from human genome
FNRYLTRRRRIEIAHTLCLSERQIKIWFQNRRMKWKK

SEQ ID NO: 29711 - protein, 37 aa, Artificial Sequence
  Quasi-synthetic sequence derived from human genome
FNRYLTRRRRIEIANALCLTERQIKIWFQNRRMKWKK

SEQ ID NO: 29712 - protein, 37 aa, Artificial Sequence
  Quasi-synthetic sequence derived from human genome
AEQMNVRMPFRRKIYYLPRRYKFMSRIDKQISRFRRW

SEQ ID NO: 29713 - protein, 37 aa, Artificial Sequence
  Quasi-synthetic sequence derived from human genome
RYRLIREFHSRPALAPPFIVISHLRLLLRQLCRRPRS

SEQ ID NO: 29714 - protein, 37 aa, Artificial Sequence
  Quasi-synthetic sequence derived from human genome
IHLFRKPQRSFFGKLLREFRLVAADRRSWKILLFGVI

SEQ ID NO: 29715 - protein, 37 aa, Artificial Sequence
  Quasi-synthetic sequence derived from human genome
RKFGNRIKVLRSRIRFIHLVTGCVLGSSGKVLPKWGW

SEQ ID NO: 29716 - protein, 37 aa, Artificial Sequence
  Quasi-synthetic sequence derived from human genome
KMVKKIAMREIKLLKQLRHENLVNLLEVCKKKKRWYL

SEQ ID NO: 29717 - protein, 37 aa, Artificial Sequence
  Quasi-synthetic sequence derived from human genome
FKKCIKSTVGFDAIRVYNKRLKALRKIQKLIKSGQLR

SEQ ID NO: 29718 - protein, 37 aa, Artificial Sequence
  Quasi-synthetic sequence derived from human genome
TFWRNKKSNKVLPMRRVLRKRPSPAPRTIRIEWLKSK

SEQ ID NO: 29719 - protein, 37 aa, Artificial Sequence
  Quasi-synthetic sequence derived from human genome
VPIRHSRKMRKLMLDLNKAKSMGQRLSLISKFRFNFL

SEQ ID NO: 29720 - protein, 37 aa, Artificial Sequence
  Quasi-synthetic sequence derived from human genome
MKKFLYIKSVFHTLRMAQRRHKRVRTWTRHINIFNKD

SEQ ID NO: 29721 - protein, 37 aa, Artificial Sequence
  Quasi-synthetic sequence derived from human genome
VRRTLLQAALRAWVIQCWWRSMQAKMLEQRRRLALRL

SEQ ID NO: 29722 - protein, 37 aa, Artificial Sequence
  Quasi-synthetic sequence derived from human genome
GRGRRLGLALGLLLALVLAPRVLRAKPTVRKERVVRP

SEQ ID NO: 29723 - protein, 37 aa, Artificial Sequence
  Quasi-synthetic sequence derived from human genome
KITWYILVLLVFIFLIILTIRKILEGQRRVQKWQSHR

SEQ ID NO: 29724 - protein, 37 aa, Artificial Sequence
  Quasi-synthetic sequence derived from human genome
HISVMGGLIALLLLLLVFTVALYAQRRWQKRRRIPQK

SEQ ID NO: 29725 - protein, 37 aa, Artificial Sequence
  Quasi-synthetic sequence derived from human genome
RIYNSTYLGRAFFGLKVALIFPVLVLLTVFIFVVRKK

SEQ ID NO: 29726 - protein, 37 aa, Artificial Sequence
  Quasi-synthetic sequence derived from human genome
IKLMFAGLFFLFFVRFGIGRQLLIKFPWFFSFGYFSK

SEQ ID NO: 29727 - protein, 37 aa, Artificial Sequence
  Quasi-synthetic sequence derived from human genome
RFLLKCGFITIPWRCIKKCSPLMPRAAVPRFVQQKLY

SEQ ID NO: 29728 - protein, 37 aa, Artificial Sequence
  Quasi-synthetic sequence derived from human genome
RKRYRRKLKKYGKNVGKVIIKGCRYVVIGLQGFAAAY

SEQ ID NO: 29729 - protein, 37 aa, Artificial Sequence
  Quasi-synthetic sequence derived from human genome
LLKRRPYGRNKPLISRTMMKNILGHAFYQLIVIFILV

SEQ ID NO: 29730 - protein, 37 aa, Artificial Sequence
  Quasi-synthetic sequence derived from human genome
FKVMKPKVLRSWCRQILKGLLFLHTRTPPIIHRDLKC

SEQ ID NO: 29731 - protein, 37 aa, Artificial Sequence
  Quasi-synthetic sequence derived from human genome
WRVCQKSHCFRLGRQLSKALQVNCVVRKLLVQLRRLY

SEQ ID NO: 29732 - protein, 37 aa, Artificial Sequence
  Quasi-synthetic sequence derived from human genome
LVWKNWLGVKRQPLWTLVLILWPVIIFIILAITRTKF

SEQ ID NO: 29733 - protein, 37 aa, Artificial Sequence
  Quasi-synthetic sequence derived from human genome
FLPLVVTLLVRYRHYFRLLVRTVLLRSLRDCLSGLRI

SEQ ID NO: 29734 - protein, 37 aa, Artificial Sequence
  Quasi-synthetic sequence derived from human genome
KVAVIASIVSCAIILLMSMAFLTCCLLKCVKKSKRRR

SEQ ID NO: 29735 - protein, 37 aa, Artificial Sequence
  Quasi-synthetic sequence derived from human genome
MMKKLFLQLIAEFKRLGSSVIYANFNRIILCTKKRRV

SEQ ID NO: 29736 - protein, 37 aa, Artificial Sequence
  Quasi-synthetic sequence derived from human genome
RYWAISRPFRYKRKMTQRMALVMVGLAWTLSILISFI

SEQ ID NO: 29737 - protein, 37 aa, Artificial Sequence
  Quasi-synthetic sequence derived from human genome
RLVLGFLWPLLTLTICYTFILLRTWSRRATRSTKTLK

SEQ ID NO: 29738 - protein, 37 aa, Artificial Sequence
  Quasi-synthetic sequence derived from human genome
RGWMARRHFQRLRDAAIVIQCAFRMLKARRELKALRI

SEQ ID NO: 29739 - protein, 37 aa, Artificial Sequence
  Quasi-synthetic sequence derived from human genome
RRRRMHVLRRRWDLGSLCRALLTRGLAALGHSLKHVL

SEQ ID NO: 29740 - protein, 37 aa, Artificial Sequence
  Quasi-synthetic sequence derived from human genome
LAGIVATICFLAAAILFSTLAACFVNKQRKRKLKRKK

SEQ ID NO: 29741 - protein, 37 aa, Artificial Sequence
  Quasi-synthetic sequence derived from human genome
SRRGFFTKLPPAERRYFKRVVLAARTKRGHLVLKSFK

SEQ ID NO: 29742 - protein, 37 aa, Artificial Sequence
  Quasi-synthetic sequence derived from human genome
LFALPFGRTAKPAHIAKVKMKFRFLGKLMAKAIMDFR

SEQ ID NO: 29743 - protein, 37 aa, Artificial Sequence
  Quasi-synthetic sequence derived from human genome
RRILQRVPGKQRFGIYRFLPFFFVLGGTMEWIMIKVR

SEQ ID NO: 29744 - protein, 37 aa, Artificial Sequence
  Quasi-synthetic sequence derived from human genome
RCYRKYKQLTWIALKFALYKKMTQAAILIQSKFRSYY

SEQ ID NO: 29745 - protein, 37 aa, Artificial Sequence
  Quasi-synthetic sequence derived from human genome
FLATIMGVRFKRSKKIMPAGLVAGLSLMMILRLVLLL

SEQ ID NO: 29746 - protein, 37 aa, Artificial Sequence
  Quasi-synthetic sequence derived from human genome
GLYMLFLLVLVFFLMGLVGFMICHVLKKKGYRCRTSR

SEQ ID NO: 29747 - protein, 37 aa, Artificial Sequence
  Quasi-synthetic sequence derived from human genome
KGMDSEVYKTARALRIVRFTKILSLLRLLRLSRLIRY

SEQ ID NO: 29748 - protein, 37 aa, Artificial Sequence
  Quasi-synthetic sequence derived from human genome
FLHCCLNPVLYAFIGQKFRNYFLKILKDLWCVRRKYK

SEQ ID NO: 29749 - protein, 37 aa, Artificial Sequence
  Quasi-synthetic sequence derived from human genome
RIRGTRMYQPLTEDEIRIFKRKKRIKRRALLFLSYIL

SEQ ID NO: 29750 - protein, 37 aa, Artificial Sequence
  Quasi-synthetic sequence derived from human genome
KKFKLWLLNALEGVPALLQISKLKEVTLFVKRLRRKT

SEQ ID NO: 29751 - protein, 37 aa, Artificial Sequence
  Quasi-synthetic sequence derived from human genome
RNKLKYLAFLRKRMNTNPSRGPYHFRAPSRIFWRTVR

SEQ ID NO: 29752 - protein, 37 aa, Artificial Sequence
  Quasi-synthetic sequence derived from human genome
IILLMSMAFLTCCLLKCVKKSKRRRSNRSAQLWSQLK

SEQ ID NO: 29753 - protein, 37 aa, Artificial Sequence
  Quasi-synthetic sequence derived from human genome
LLMVLRCLRPLRIFKLVPQMRKVVRELFSGFKEIFLV

SEQ ID NO: 29754 - protein, 37 aa, Artificial Sequence
  Quasi-synthetic sequence derived from human genome
APWVKVVFLEKLPALLFMQQPRHHCARQRLRLRRRQR

SEQ ID NO: 29755 - protein, 37 aa, Artificial Sequence
  Quasi-synthetic sequence derived from human genome
VHLQLLRRHTLRAAERNVRRKKVSFQLERIIKKQRLL

SEQ ID NO: 29756 - protein, 37 aa, Artificial Sequence
  Quasi-synthetic sequence derived from human genome
KRSWPFLRSFRVLRVFKLAKSWPTLNTLIKIIGNSVG

SEQ ID NO: 29757 - protein, 37 aa, Artificial Sequence
  Quasi-synthetic sequence derived from human genome
RTLMHLSRCAIRRTLHNRCHRAIPLLSLPLSLKKYLL

SEQ ID NO: 29758 - protein, 37 aa, Artificial Sequence
  Quasi-synthetic sequence derived from human genome
TLSWKRYQPCWVLMVSVLLHHWKALKKVNMKLLVNIR

SEQ ID NO: 29759 - protein, 37 aa, Artificial Sequence
  Quasi-synthetic sequence derived from human genome
ISLVALLVAFVLFLRLRSIRCLRNIIHWNLISAFILR

SEQ ID NO: 29760 - protein, 37 aa, Artificial Sequence
  Quasi-synthetic sequence derived from human genome
RALLVVVNALLRKRRYHAALAVLKGFRNGAVYGAKIR

SEQ ID NO: 29761 - protein, 37 aa, Artificial Sequence
  Quasi-synthetic sequence derived from human genome
RKHLSWWWLATVCMLLFSHLSAVQTRGIKHRIKWNRK

SEQ ID NO: 29762 - protein, 37 aa, Artificial Sequence
  Quasi-synthetic sequence derived from human genome
RRWKKKQLRRPSLLLLGCCSFGIMAPSLWKGLVGIGL

SEQ ID NO: 29763 - protein, 37 aa, Artificial Sequence
  Quasi-synthetic sequence derived from human genome
KRYVAYFAQVKHLYNWNLPPRRILFIKHFIIYSIPRY

SEQ ID NO: 29764 - protein, 37 aa, Artificial Sequence
  Quasi-synthetic sequence derived from human genome
RQSLIEYKAAVTLQRAALKFLAKCRKKKKLFAPWRGL

SEQ ID NO: 29765 - protein, 37 aa, Artificial Sequence
  Quasi-synthetic sequence derived from human genome
PAKKKRKKGLRIKGKRRRKKLILAKKFSKDLGSGRPV

SEQ ID NO: 29766 - protein, 37 aa, Artificial Sequence
  Quasi-synthetic sequence derived from human genome
AKILGVLRVLRLLRTLRPLRVISRAPGLKLVVETLIS

SEQ ID NO: 29767 - protein, 37 aa, Artificial Sequence
  Quasi-synthetic sequence derived from human genome
WGMFSVITSYILFRATRKPLSGRTPRLVYKWFLLIYK

SEQ ID NO: 29768 - protein, 37 aa, Artificial Sequence
  Quasi-synthetic sequence derived from human genome
LARQRGVGQQAMSLAILRVIRLVRVFRIFKLSRHSKG

SEQ ID NO: 29769 - protein, 37 aa, Artificial Sequence
  Quasi-synthetic sequence derived from human genome
WIYNKTKMAFLLVGICFLCKLCTIIFTTIAFFIYKRR

SEQ ID NO: 29770 - protein, 37 aa, Artificial Sequence
  Quasi-synthetic sequence derived from human genome
MRGRLFYTAKAKKTGKVMIRIHPCARLCFCKCWTCFK

SEQ ID NO: 29771 - protein, 37 aa, Artificial Sequence
  Quasi-synthetic sequence derived from human genome
LRARVSYRLLGVISLLHLVLSMGLQLYGFRQRQRARK

SEQ ID NO: 29772 - protein, 37 aa, Artificial Sequence
  Quasi-synthetic sequence derived from human genome
IIQRMYARRFLYHSRTRDLRDYIRIHRIPKPLKQRML

SEQ ID NO: 29773 - protein, 37 aa, Artificial Sequence
  Quasi-synthetic sequence derived from human genome
RLTFFFLIPLFIMIGCYLVIIHNLLHGRTSKLKPKVK

SEQ ID NO: 29774 - protein, 37 aa, Artificial Sequence
  Quasi-synthetic sequence derived from human genome
FLWHTYRWLLLKLLLLLLLLLLLALFLYSVPGYLVKK

SEQ ID NO: 29775 - protein, 37 aa, Artificial Sequence
  Quasi-synthetic sequence derived from human genome
FLVLLFSQYARNVKFPLPIYKSKKGWTAYKLQLFKMF

SEQ ID NO: 29776 - protein, 37 aa, Artificial Sequence
  Quasi-synthetic sequence derived from human genome
FLRVVRFVRILRIFKLTRHFVGLRVLGHTLRASTNEF

SEQ ID NO: 29777 - protein, 37 aa, Artificial Sequence
  Quasi-synthetic sequence derived from human genome
RVRKLRSAGRCGKFHQVRRVMTILFLTMVISYFGCMK

SEQ ID NO: 29778 - protein, 37 aa, Artificial Sequence
  Quasi-synthetic sequence derived from human genome
WLSERRHYYLLRQFKIFSDFRMNKAFVTWKLNVKRIK

SEQ ID NO: 29779 - protein, 37 aa, Artificial Sequence
  Quasi-synthetic sequence derived from human genome
VFWPILVMYFIMLFCITMKRQIKHMIKYRYIPFTHGK

SEQ ID NO: 29780 - protein, 37 aa, Artificial Sequence
  Quasi-synthetic sequence derived from human genome
ISVKVMLKSIKTRLGRRVPAAPPALRRNLLLQAWKCV

SEQ ID NO: 29781 - protein, 37 aa, Artificial Sequence
  Quasi-synthetic sequence derived from human genome
EKLKNILLRIQQIIYCHKLTIILTKWRNTARHKSKKK

SEQ ID NO: 29782 - protein, 37 aa, Artificial Sequence
  Quasi-synthetic sequence derived from human genome
RRVLCYPLYRHFKLVMKAYRDTIKILQLGKSAVLKCL

SEQ ID NO: 29783 - protein, 37 aa, Artificial Sequence
  Quasi-synthetic sequence derived from human genome
KNLKALYVVHPTSFIKVLWNILKPLISHKFGKKVIYF

SEQ ID NO: 29784 - protein, 37 aa, Artificial Sequence
  Quasi-synthetic sequence derived from human genome
LCYVNSTVNPICYALCNRTFRKTFKMLLLCRWKKKKV

SEQ ID NO: 29785 - protein, 37 aa, Artificial Sequence
  Quasi-synthetic sequence derived from human genome
LLIMVICYSGILKTLLRCRNEKKRHRAVRVIFTIMIV

SEQ ID NO: 29786 - protein, 37 aa, Artificial Sequence
  Quasi-synthetic sequence derived from human genome
RGSSLHPFRKGLQEKDKVWLLREQKRKKKLRKLLKRL

SEQ ID NO: 29787 - protein, 37 aa, Artificial Sequence
  Quasi-synthetic sequence derived from human genome
RKRALSRLKLKLNKDIVISVGIYNLVQKALKPPPIKL

SEQ ID NO: 29788 - protein, 37 aa, Artificial Sequence
  Quasi-synthetic sequence derived from human genome
IVLVTELMTSGTLKTYLKRFKVMKIKVLRSWCRQILK

SEQ ID NO: 29789 - protein, 37 aa, Artificial Sequence
  Quasi-synthetic sequence derived from human genome
LLAILLVVAVFCILWNWNKRKKRQVPYLRVTVMPLLT

SEQ ID NO: 29790 - protein, 37 aa, Artificial Sequence
  Quasi-synthetic sequence derived from human genome
WRGRYGRRRPFIWALSLGILLSLFLIPRAGWLAGLLC

SEQ ID NO: 29791 - protein, 37 aa, Artificial Sequence
  Quasi-synthetic sequence derived from human genome
LRIPFARYVARNNILNLKRYCIERVFRPRKLDRFHPK

SEQ ID NO: 29792 - protein, 37 aa, Artificial Sequence
  Quasi-synthetic sequence derived from human genome
VFCILWNWNKRKKRQVPYLRVTVMPLLTLPQTRQRAK

SEQ ID NO: 29793 - protein, 37 aa, Artificial Sequence
  Quasi-synthetic sequence derived from human genome
LILSGFYSIMPPLFNPIIYSLRNKQIKVAIKKIMKRI

SEQ ID NO: 29794 - protein, 37 aa, Artificial Sequence
  Quasi-synthetic sequence derived from human genome
PRVTNIFPKQKYLSKKTTKRKRGYIKNKLVFKKGKKI

SEQ ID NO: 29795 - protein, 37 aa, Artificial Sequence
  Quasi-synthetic sequence derived from human genome
TLNLNNEVVKMRKEVKRIRVLVIRKLVRSVGRLKSKK

SEQ ID NO: 29796 - protein, 37 aa, Artificial Sequence
  Quasi-synthetic sequence derived from human genome
KTFMVLNRKRTIYRFSAKHALFIFGPFNSIRSLAIRV

SEQ ID NO: 29797 - protein, 37 aa, Artificial Sequence
  Quasi-synthetic sequence derived from human genome
YFNSCVNPLIYPCSSREFKRAFLRLLRCQCRRRRRRR

SEQ ID NO: 29798 - protein, 37 aa, Artificial Sequence
  Quasi-synthetic sequence derived from human genome
VVSPVSYLLQLKGKKHVLHLWPKRLLLPRHLRVFSFT

SEQ ID NO: 29799 - protein, 37 aa, Artificial Sequence
  Quasi-synthetic sequence derived from human genome
KVRTLKKFIKLLGEIMEHRFKTYQQFRRCLTLRCKLY

SEQ ID NO: 29800 - protein, 37 aa, Artificial Sequence
  Quasi-synthetic sequence derived from human genome
QKVARKFWWKNVKMIVLICVIVFIIILFIVLFATGAF

SEQ ID NO: 29801 - protein, 37 aa, Artificial Sequence
  Quasi-synthetic sequence derived from human genome
RLRLQQLRRLRGLLRVLRGRPGAGSRRRGRMALCGQA

SEQ ID NO: 29802 - protein, 37 aa, Artificial Sequence
  Quasi-synthetic sequence derived from human genome
VKYVKLARSLRTYGVSFFLVKEKMKGKNKLVPRLLGI

SEQ ID NO: 29803 - protein, 37 aa, Artificial Sequence
  Quasi-synthetic sequence derived from human genome
LRRRKAHFQYLLNHRLQILSPVLPVSCRDPRHLRRLR

SEQ ID NO: 29804 - protein, 37 aa, Artificial Sequence
  Quasi-synthetic sequence derived from human genome
RRLQSLPKCERLPLPSFLLLPFQRITRLRMLLQNILR

SEQ ID NO: 29805 - protein, 37 aa, Artificial Sequence
  Quasi-synthetic sequence derived from human genome
RFLNVRASAIIIQRKWRAILPAKIAHEHFLMIKRHRA

SEQ ID NO: 29806 - protein, 37 aa, Artificial Sequence
  Quasi-synthetic sequence derived from human genome
LVQKSLYIQAKYQRLRFTGPRGFITHKFRERLMRKKK

SEQ ID NO: 29807 - protein, 37 aa, Artificial Sequence
  Quasi-synthetic sequence derived from human genome
RRYLQRRREKLMLARRGITLQKMEMPKQTRHRKLKVL

SEQ ID NO: 29808 - protein, 37 aa, Artificial Sequence
  Quasi-synthetic sequence derived from human genome
KYLRKSLKIIYLNSIQELEIRNMSWPRLIRKLRCYLK

SEQ ID NO: 29809 - protein, 37 aa, Artificial Sequence
  Quasi-synthetic sequence derived from human genome
QARMWRIRRRYCQVLNAVRIIQAYWRCRSCASRGFIK

SEQ ID NO: 29810 - protein, 37 aa, Artificial Sequence
  Quasi-synthetic sequence derived from human genome
KSKTKSKYASYLSFIKILLKRGGVRVSTKNLIKLFQI

SEQ ID NO: 29811 - protein, 37 aa, Artificial Sequence
  Quasi-synthetic sequence derived from human genome
KRVKLAQGLWLMNWFSVLAGIIIFSLGLFLKIELRKR

SEQ ID NO: 29812 - protein, 37 aa, Artificial Sequence
  Quasi-synthetic sequence derived from human genome
LKKNKIHSLPDKVFIKYTKLKKIFLQHNCIRHISRKA

SEQ ID NO: 29813 - protein, 37 aa, Artificial Sequence
  Quasi-synthetic sequence derived from human genome
APVPLLLMILKPVQKLFAIIVGRGIRKWWQALPPNKK

SEQ ID NO: 29814 - protein, 37 aa, Artificial Sequence
  Quasi-synthetic sequence derived from human genome
LVSGIRTPPVRRNSKLATLGRIFKPWKWRKKKNEKLK

SEQ ID NO: 29815 - protein, 37 aa, Artificial Sequence
  Quasi-synthetic sequence derived from human genome
MYVCIREKILLYKTHWMTPIFLKVVINTRRIKHHFKI

SEQ ID NO: 29816 - protein, 37 aa, Artificial Sequence
  Quasi-synthetic sequence derived from human genome
SLKMIPRIDYDRIKARMSLKDWFAKRKKFKRPPQRLF

SEQ ID NO: 29817 - protein, 37 aa, Artificial Sequence
  Quasi-synthetic sequence derived from human genome
RRTRSGVGWKRVLRSLCHSRTRVPLLAAIYFLMIHVL

SEQ ID NO: 29818 - protein, 37 aa, Artificial Sequence
  Quasi-synthetic sequence derived from human genome
KKRMFKFHQMKHIFEILDKMRCLRKRSTVSFLGVLVI

SEQ ID NO: 29819 - protein, 37 aa, Artificial Sequence
  Quasi-synthetic sequence derived from human genome
WHLYALASVLQRNIYSIYPMRNLKIRPYFNRVIRPRR

SEQ ID NO: 29820 - protein, 37 aa, Artificial Sequence
  Quasi-synthetic sequence derived from human genome
KSKKICPLYWYKFAKTFLIWNCSPCWLKLKEFVHRII

SEQ ID NO: 29821 - protein, 37 aa, Artificial Sequence
  Quasi-synthetic sequence derived from human genome
ILISSWFRGNMQKKCYGKIKASVLLIQAFVRGWKARK

SEQ ID NO: 29822 - protein, 37 aa, Artificial Sequence
  Quasi-synthetic sequence derived from human genome
SVSVIIALRRAVKRHRERRERQKRVFRMSLLIISTFL

SEQ ID NO: 29823 - protein, 37 aa, Artificial Sequence
  Quasi-synthetic sequence derived from human genome
IIRIMRVLRIARVLKLLKMAVGMRALLDTVGNLGLLF

SEQ ID NO: 29824 - protein, 37 aa, Artificial Sequence
  Quasi-synthetic sequence derived from human genome
FYFLKIANFSNSIFLYLKWRVKKVVLVLLLVTSVFLF

SEQ ID NO: 29825 - protein, 37 aa, Artificial Sequence
  Quasi-synthetic sequence derived from human genome
FKKFAARKKWKQSVRLISLCQRLSRSFLSRSNMSVAR

SEQ ID NO: 29826 - protein, 37 aa, Artificial Sequence
  Quasi-synthetic sequence derived from human genome
RRAWLSVLLGLVLGFVLASRLVLPRASELKRAGPRRR

SEQ ID NO: 29827 - protein, 37 aa, Artificial Sequence
  Quasi-synthetic sequence derived from human genome
TLLRKLGVKLVQRLGLTFLKPKVAAWRYQRGCRSLAA

SEQ ID NO: 29828 - protein, 37 aa, Artificial Sequence
  Quasi-synthetic sequence derived from human genome
IETYFVSPTLFRVIRLARIGRILRLVKGAKGIRTLLF

SEQ ID NO: 29829 - protein, 37 aa, Artificial Sequence
  Quasi-synthetic sequence derived from human genome
RSLKPMQTRVVGRLQKPCFFFHWLKLFAIPILLIAVF

SEQ ID NO: 29830 - protein, 37 aa, Artificial Sequence
  Quasi-synthetic sequence derived from human genome
TWALLCKNCLKKWRMKRQTLLEWLFSFLLVLFLYLFF

SEQ ID NO: 29831 - protein, 37 aa, Artificial Sequence
  Quasi-synthetic sequence derived from human genome
AFVGILLFLILVGLLIFFLKRRNKKKQQKPELRDLVF

SEQ ID NO: 29832 - protein, 37 aa, Artificial Sequence
  Quasi-synthetic sequence derived from human genome
RPRRRFLCHLSRQQLRMAMRIPVLYEQLKREKLRVHK

SEQ ID NO: 29833 - protein, 37 aa, Artificial Sequence
  Quasi-synthetic sequence derived from human genome
RCKKLRNGVKYCKVLRLPEILCIHLKRFRHEVMYSFK

SEQ ID NO: 29834 - protein, 37 aa, Artificial Sequence
  Quasi-synthetic sequence derived from human genome
SFIAVGILGVVLLAIFVALFFLTKKRRQRQRLAVSSR

SEQ ID NO: 29835 - protein, 37 aa, Artificial Sequence
  Quasi-synthetic sequence derived from human genome
VWLAYKTPKLLRTARGRRIKKCATQLCRRCKTVCQFR

SEQ ID NO: 29836 - protein, 37 aa, Artificial Sequence
  Quasi-synthetic sequence derived from human genome
VGVGIAGALFILGALYSIKVMNRRRRNGFKRHKRKQR

SEQ ID NO: 29837 - protein, 37 aa, Artificial Sequence
  Quasi-synthetic sequence derived from human genome
KVLFRKSEKYMKLFLWLLVGVGLLGLGLRHKAYERKL

SEQ ID NO: 29838 - protein, 37 aa, Artificial Sequence
  Quasi-synthetic sequence derived from human genome
MPSPRPVLLRGARAALLLLLPPRLLARPSLLLRRSLS

SEQ ID NO: 29839 - protein, 37 aa, Artificial Sequence
  Quasi-synthetic sequence derived from human genome
LYHARLWLHVLPTLPGTLCLRIFRWGPRRRRQGSRTL

SEQ ID NO: 29840 - protein, 37 aa, Artificial Sequence
  Quasi-synthetic sequence derived from human genome
LLLRRTYARNLPAFVNRLGILTVRHLKRLERVIIGYL

SEQ ID NO: 29841 - protein, 37 aa, Artificial Sequence
  Quasi-synthetic sequence derived from human genome
GPRMAFFSILTVRSALFALRYNILTLMRMLSLKSLKK

SEQ ID NO: 29842 - protein, 37 aa, Artificial Sequence
  Quasi-synthetic sequence derived from human genome
WFIFISLAQTMKTLRLRKNTVKFSLYRHFKNTLIFAV

SEQ ID NO: 29843 - protein, 37 aa, Artificial Sequence
  Quasi-synthetic sequence derived from human genome
TFNLPRLCIRKFFPKKKCFVFDRPVHRRKLAQLEKLQ

SEQ ID NO: 29844 - protein, 37 aa, Artificial Sequence
  Quasi-synthetic sequence derived from human genome
RPVFPCRRRFCPRPFLVGLVVAICLFYQTLTLRGSRK

SEQ ID NO: 29845 - protein, 37 aa, Artificial Sequence
  Quasi-synthetic sequence derived from human genome
RFLRTRNLIAPIFLHRTLTYMSHRNSRTNIKRKTFKV

SEQ ID NO: 29846 - protein, 37 aa, Artificial Sequence
  Quasi-synthetic sequence derived from human genome
RYWLWYTTKNCVGGLARKAWERLRLHRVNLIALQRRR

SEQ ID NO: 29847 - protein, 37 aa, Artificial Sequence
  Quasi-synthetic sequence derived from human genome
NKNMQFLFVNKRLVLRTKLHKLIDFLLRKESIICKPK

SEQ ID NO: 29848 - protein, 37 aa, Artificial Sequence
  Quasi-synthetic sequence derived from human genome
KVKFDIRYIVLLRSVRPLRLFVYDVFWLRFSNRAFAL

SEQ ID NO: 29849 - protein, 37 aa, Artificial Sequence
  Quasi-synthetic sequence derived from human genome
RKKYRFHKTRSRMTHRTPKVKKSPKVRKKSYLSRLML

SEQ ID NO: 29850 - protein, 37 aa, Artificial Sequence
  Quasi-synthetic sequence derived from human genome
LRLRVHGPFFPRILRRRKGKREFGKTITHIVAKMMTT

SEQ ID NO: 29851 - protein, 37 aa, Artificial Sequence
  Quasi-synthetic sequence derived from human genome
KNIIRTKMFLYLSDLSRKDRRIVSKKYKIYFWNIITI

SEQ ID NO: 29852 - protein, 37 aa, Artificial Sequence
  Quasi-synthetic sequence derived from human genome
RMPKGMWICQICRPRKKGRKLLQKKAAQIKRRYTNPI

SEQ ID NO: 29853 - protein, 37 aa, Artificial Sequence
  Quasi-synthetic sequence derived from human genome
LLSSRRARRIPKLVQRINSIYNAKRGKKRLKKLSMSS

SEQ ID NO: 29854 - protein, 37 aa, Artificial Sequence
  Quasi-synthetic sequence derived from human genome
AFVLLIFIVSMIYLACKKPKKPQRRQNNRLKPLTLAY

SEQ ID NO: 29855 - protein, 37 aa, Artificial Sequence
  Quasi-synthetic sequence derived from human genome
VVGYFCVIFLLNVSMFIVVLVQLCRIKKKKQLGAQRK

SEQ ID NO: 29856 - protein, 37 aa, Artificial Sequence
  Quasi-synthetic sequence derived from human genome
LMAHPFLLLILLCMSLLLFQVIRLYQRRRWTIRAMHL

SEQ ID NO: 29857 - protein, 37 aa, Artificial Sequence
  Quasi-synthetic sequence derived from human genome
WFKNQLLPELQVIHNRYKPLRRRVIWLIGQWISVKFK

SEQ ID NO: 29858 - protein, 37 aa, Artificial Sequence
  Quasi-synthetic sequence derived from human genome
DVIAFLLACVATMIFMITKCCLFCFRKLAKTGKKKKR

SEQ ID NO: 29859 - protein, 37 aa, Artificial Sequence
  Quasi-synthetic sequence derived from human genome
KKPFSQHVRKLRASITPGTILIILTGRHRGKRVVFLK

SEQ ID NO: 29860 - protein, 37 aa, Artificial Sequence
  Quasi-synthetic sequence derived from human genome
AKLHAALYERKLLSLEVRKRRRRSSRLRAMRPKYPVI

SEQ ID NO: 29861 - protein, 37 aa, Artificial Sequence
  Quasi-synthetic sequence derived from human genome
KMSRALRHYYKLNIIKKEPGQKLLFRNGLQLIFIFIW

SEQ ID NO: 29862 - protein, 37 aa, Artificial Sequence
  Quasi-synthetic sequence derived from human genome
IFRFLTRFFYAKKKASYSQISQKNLDFTILLRLKTLR

SEQ ID NO: 29863 - protein, 37 aa, Artificial Sequence
  Quasi-synthetic sequence derived from human genome
KTEKYVIAKNKKVGLLYRLLQASILAYLVVWVFLIKK

SEQ ID NO: 29864 - protein, 37 aa, Artificial Sequence
  Quasi-synthetic sequence derived from human genome
FRRPKTLRLRRQPKYPRKSAPRRNKLDHYAIIKFPLT

SEQ ID NO: 29865 - protein, 37 aa, Artificial Sequence
  Quasi-synthetic sequence derived from human genome
WWSGLVIIIAVCCASLVFLTVLVIICYKAIKRKPLRK

SEQ ID NO: 29866 - protein, 37 aa, Artificial Sequence
  Quasi-synthetic sequence derived from human genome
WFMSPFKCLYYLIWKNYKKYIIIAFILIILIIFLVLF

SEQ ID NO: 29867 - protein, 37 aa, Artificial Sequence
  Quasi-synthetic sequence derived from human genome
KKPHRYKPGTLALREIRKYQKSTQLLLRKLPFQRLVR

SEQ ID NO: 29868 - protein, 37 aa, Artificial Sequence
  Quasi-synthetic sequence derived from human genome
LWLVLVAVGAGLLLLGLIILLLWKCGFFKRARTRALY

SEQ ID NO: 29869 - protein, 37 aa, Artificial Sequence
  Quasi-synthetic sequence derived from human genome
LSRLQKPRAFILKSKGIKQKQIIPKNLLDSKSLKLII

SEQ ID NO: 29870 - protein, 37 aa, Artificial Sequence
  Quasi-synthetic sequence derived from human genome
YNRYLTRRRRIEIAHALCLTERQIKIWFQNRRMKWKK

SEQ ID NO: 29871 - protein, 37 aa, Artificial Sequence
  Quasi-synthetic sequence derived from human genome
KWMAKKHKKIRLRCQKGIPPSLRGRAWQYLSGGKVKL

SEQ ID NO: 29872 - protein, 37 aa, Artificial Sequence
  Quasi-synthetic sequence derived from human genome
YSSPSLRIARFRFRAFHFLNRFPSVYLRCKMVVCRAY

SEQ ID NO: 29873 - protein, 37 aa, Artificial Sequence
  Quasi-synthetic sequence derived from human genome
LKRQKAPRSKLISVLKILYQIVPSHKLMLEFHTLLRK

SEQ ID NO: 29874 - protein, 37 aa, Artificial Sequence
  Quasi-synthetic sequence derived from human genome
FILLGVFGGLWGAFFIRANIAWCRRRKSTKFGKYPVL

SEQ ID NO: 29875 - protein, 37 aa, Artificial Sequence
  Quasi-synthetic sequence derived from human genome
NRYKIRHTKKKTFKCMKCSKSFFMLSHLIQHKRIHTR

SEQ ID NO: 29876 - protein, 37 aa, Artificial Sequence
  Quasi-synthetic sequence derived from human genome
LINWFICSLCVPRVRKLWSSRRPRTRRNLLLGTACAI

SEQ ID NO: 29877 - protein, 37 aa, Artificial Sequence
  Quasi-synthetic sequence derived from human genome
RGTHTCTRQGRLRELRIRCVARKFLYLWIRMTFGRVF

SEQ ID NO: 29878 - protein, 37 aa, Artificial Sequence
  Quasi-synthetic sequence derived from human genome
HRMWGRLVGLVYILPAAYFWRKGWLSRGMKGRVLALC

SEQ ID NO: 29879 - protein, 37 aa, Artificial Sequence
  Quasi-synthetic sequence derived from human genome
FAITRFKHLKKLLLVHGHWCYSRLARMVVYYLYKNVC

SEQ ID NO: 29880 - protein, 37 aa, Artificial Sequence
  Quasi-synthetic sequence derived from human genome
KKRWSVLAAAGLRGLVRLLHVRAGFCCGVIRAHKKAI

SEQ ID NO: 29881 - protein, 37 aa, Artificial Sequence
  Quasi-synthetic sequence derived from human genome
LSRSYLAVWALSSLLVFLLMVAVYTRIFFYVRRRVQR

SEQ ID NO: 29882 - protein, 37 aa, Artificial Sequence
  Quasi-synthetic sequence derived from human genome
KSLWYLIKWIWTHLCKKKMRRKPESFGTIGVRTQHRR

SEQ ID NO: 29883 - protein, 37 aa, Artificial Sequence
  Quasi-synthetic sequence derived from human genome
LKKLGIKLQVLINLGLVYKVQQHNGIIFQFVAFIKRR

SEQ ID NO: 29884 - protein, 37 aa, Artificial Sequence
  Quasi-synthetic sequence derived from human genome
GRVAQVLRLMRIFRILKLARHSTGLRSLGATLKYSYK

SEQ ID NO: 29885 - protein, 37 aa, Artificial Sequence
  Quasi-synthetic sequence derived from human genome
ILTGRHRGKRVVFLKQLASGLLLVTGPLVLNRVPLRR

SEQ ID NO: 29886 - protein, 37 aa, Artificial Sequence
  Quasi-synthetic sequence derived from human genome
FNRYLTRRRRIEIANNLCLNERQIKIWFQNRRMKWKK

SEQ ID NO: 29887 - protein, 37 aa, Artificial Sequence
  Quasi-synthetic sequence derived from human genome
IRHWRQWNRIFRWKCHDIVKSKVFYWLVILIVALNTL

SEQ ID NO: 29888 - protein, 37 aa, Artificial Sequence
  Quasi-synthetic sequence derived from human genome
RRYSFRLHIGRNIARPWKLIYYRAKKMFDVNNYKGRY

SEQ ID NO: 29889 - protein, 37 aa, Artificial Sequence
  Quasi-synthetic sequence derived from human genome
LIRRIHKVDIPSIITKKLLKAAMKHIEVIVKARQKVK

SEQ ID NO: 29890 - protein, 37 aa, Artificial Sequence
  Quasi-synthetic sequence derived from human genome
AALVLLLLFMMTVFFAKKLYLLKTENTKLRRTNKFRT

SEQ ID NO: 29891 - protein, 37 aa, Artificial Sequence
  Quasi-synthetic sequence derived from human genome
WLKVRQFHGLLVKRFHCARRNSKALFSQILLPAFFVC

SEQ ID NO: 29892 - protein, 37 aa, Artificial Sequence
  Quasi-synthetic sequence derived from human genome
ALRRALRHDLGGKRLSKIATLRRAIHRIAALSLVLRA

SEQ ID NO: 29893 - protein, 37 aa, Artificial Sequence
  Quasi-synthetic sequence derived from human genome
WRMAKGFVMLAVSFLVAAICYFRRLHLYSGHKLKWWI

SEQ ID NO: 29894 - protein, 37 aa, Artificial Sequence
  Quasi-synthetic sequence derived from human genome
RRSRWPFSKARSFCKTHASLFKKILLGLLCLAYAAYL

SEQ ID NO: 29895 - protein, 37 aa, Artificial Sequence
  Quasi-synthetic sequence derived from human genome
FNRYLTRRRRIEIAHTLCLSERQVKIWFQNRRMKWKK

SEQ ID NO: 29896 - protein, 37 aa, Artificial Sequence
  Quasi-synthetic sequence derived from human genome
RNFHPRRLLLTGPPQVGKTGSYLQFLRILFRMLIRLL

SEQ ID NO: 29897 - protein, 37 aa, Artificial Sequence
  Quasi-synthetic sequence derived from human genome
KGKDINTIKSLRVLRVLRPLKTIKRLPKLKAVFDCVV

SEQ ID NO: 29898 - protein, 37 aa, Artificial Sequence
  Quasi-synthetic sequence derived from human genome
KILTRGERLDGFGLLLKKIMAILIKRFHHTRRNWKGL

SEQ ID NO: 29899 - protein, 37 aa, Artificial Sequence
  Quasi-synthetic sequence derived from human genome
HIKLWRRNLWIFVSKFTEFDARKLHKLYKMAHKKRSQ

SEQ ID NO: 29900 - protein, 37 aa, Artificial Sequence
  Quasi-synthetic sequence derived from human genome
ASINPILYNLISKKYRAAAFKLLLARKSRPRGFHRSR

SEQ ID NO: 29901 - protein, 37 aa, Artificial Sequence
  Quasi-synthetic sequence derived from human genome
CRGYLVRSLYQLIRMATITMQAYSRGFLARRRYRKML

SEQ ID NO: 29902 - protein, 37 aa, Artificial Sequence
  Quasi-synthetic sequence derived from human genome
KKRQAALIAYATRERAVIKLQSLVRMWRVRWRYCQVL

SEQ ID NO: 29903 - protein, 37 aa, Artificial Sequence
  Quasi-synthetic sequence derived from human genome
LLLWKNYTLQKRKVLVTVLELFLPLLFSGILIWLRLK

SEQ ID NO: 29904 - protein, 37 aa, Artificial Sequence
  Quasi-synthetic sequence derived from human genome
RLLATLLHNLISYMLLMKVNKNDIRKKVRRLMGKSHI

SEQ ID NO: 29905 - protein, 37 aa, Artificial Sequence
  Quasi-synthetic sequence derived from human genome
LLLLAMWGPQAPPCLCRKRGRGACIKCERLRPRIRRR

SEQ ID NO: 29906 - protein, 37 aa, Artificial Sequence
  Quasi-synthetic sequence derived from human genome
MVNLAAMVWRRLLRKRWVLALVFGLSLVYFLSSTFKQ

SEQ ID NO: 29907 - protein, 37 aa, Artificial Sequence
  Quasi-synthetic sequence derived from human genome
RKYLLRLDVRKDHVKFWRPQLLLLVGNPRGALPLLRL

SEQ ID NO: 29908 - protein, 37 aa, Artificial Sequence
  Quasi-synthetic sequence derived from human genome
LVQRRKKRLRHRVPPRKPEPLVKLHRTALHWACLKGH

SEQ ID NO: 29909 - protein, 37 aa, Artificial Sequence
  Quasi-synthetic sequence derived from human genome
FKVMKIKVLRSWCRQILKGLQFLHTRTPPIIHRDLKC

SEQ ID NO: 29910 - protein, 37 aa, Artificial Sequence
  Quasi-synthetic sequence derived from human genome
AGLLLLGLIILLLWKCDFFKRTRYYQIMPKYHAVRIR

SEQ ID NO: 29911 - protein, 37 aa, Artificial Sequence
  Quasi-synthetic sequence derived from human genome
LVRRTLLHAALRAWIIQCWWRMTLSRVLEKKRQAALI

SEQ ID NO: 29912 - protein, 37 aa, Artificial Sequence
  Quasi-synthetic sequence derived from human genome
YLLRGRKTFLIPVLFNNYITAALKLLEKLYKVNLKVK

SEQ ID NO: 29913 - protein, 37 aa, Artificial Sequence
  Quasi-synthetic sequence derived from human genome
YNPLFIPVAVMVTAFSGLAFIIWLARRLKKGKKSKRS

SEQ ID NO: 29914 - protein, 37 aa, Artificial Sequence
  Quasi-synthetic sequence derived from human genome
VIPSPKSLWYLIKWIWTHLCKKKMRRKPESFGTIGRR

SEQ ID NO: 29915 - protein, 37 aa, Artificial Sequence
  Quasi-synthetic sequence derived from human genome
ARKARKYEIPHFRLKKVENIKIWLSLRSYLKRRGPQR

SEQ ID NO: 29916 - protein, 37 aa, Artificial Sequence
  Quasi-synthetic sequence derived from human genome
LVWGKLGRYPPWPGKIVNPPKDLKKPRGKKCFFVKFF

SEQ ID NO: 29917 - protein, 37 aa, Artificial Sequence
  Quasi-synthetic sequence derived from human genome
LPLLLLKLHLWPQLRWLPADLAFAVRALCCKRALRAR

SEQ ID NO: 29918 - protein, 37 aa, Artificial Sequence
  Quasi-synthetic sequence derived from human genome
WLIIRLPILFAIGVNFLIFVRVICIVVSKLKANLMCK

SEQ ID NO: 29919 - protein, 37 aa, Artificial Sequence
  Quasi-synthetic sequence derived from human genome
MFRKPYVRRRPSKRRGARAFRCIKPAPVIHPASVIFT

SEQ ID NO: 29920 - protein, 37 aa, Artificial Sequence
  Quasi-synthetic sequence derived from human genome
ALFLSVLVILLVIYVSWKRYPASMKQLQQRSLMRRHR

SEQ ID NO: 29921 - protein, 37 aa, Artificial Sequence
  Quasi-synthetic sequence derived from human genome
RKSGFGGITMLFTGYFVLCCSWSFRRLKKLCRPLPWK

SEQ ID NO: 29922 - protein, 37 aa, Artificial Sequence
  Quasi-synthetic sequence derived from human genome
FILTGLLVCLACLAKCVRFSRCVLLNYWKVLPKSFLR

SEQ ID NO: 29923 - protein, 37 aa, Artificial Sequence
  Quasi-synthetic sequence derived from human genome
GIAIVSYIPGITIKLLPLRTFRVFRALKAISVVSRLK

SEQ ID NO: 29924 - protein, 37 aa, Artificial Sequence
  Quasi-synthetic sequence derived from human genome
RMMRIFWVIKLARHFIGLQTLGLTLKRCYREMVMLLV

SEQ ID NO: 29925 - protein, 37 aa, Artificial Sequence
  Quasi-synthetic sequence derived from human genome
LKLKVMDLRGKFKRPPLRRVRVSADAMLRALLGSKHK

SEQ ID NO: 29926 - protein, 37 aa, Artificial Sequence
  Quasi-synthetic sequence derived from human genome
LLLFLILGVLSLLLLVTGAFGFHLWRRQWRPRRFSAL

SEQ ID NO: 29927 - protein, 37 aa, Artificial Sequence
  Quasi-synthetic sequence derived from human genome
RRQIIRALCLLLLLLHAGSAKNIWKRALPARLAEKSR

SEQ ID NO: 29928 - protein, 37 aa, Artificial Sequence
  Quasi-synthetic sequence derived from human genome
VGRRVRSYGKRRPARTILRAFLEKARQTPHKPFLLFR

SEQ ID NO: 29929 - protein, 37 aa, Artificial Sequence
  Quasi-synthetic sequence derived from human genome
VRRIRSLQRSVQVLRAIVVMYVICWLPYHARRLMYCY

SEQ ID NO: 29930 - protein, 37 aa, Artificial Sequence
  Quasi-synthetic sequence derived from human genome
RRRASRAFCPRPCALPGRPGLTLLCRPRCRRQPRLRL

SEQ ID NO: 29931 - protein, 37 aa, Artificial Sequence
  Quasi-synthetic sequence derived from human genome
LKYLNMYASICFLTCISLQRCFFLLKPFRARDWKRRY

SEQ ID NO: 29932 - protein, 37 aa, Artificial Sequence
  Quasi-synthetic sequence derived from human genome
RKRSRRVLYPRVVRRQLPVEEPNPAKRLLFLLLTIVF

SEQ ID NO: 29933 - protein, 37 aa, Artificial Sequence
  Quasi-synthetic sequence derived from human genome
LRAAKWLHFPQLALRRRLGQLSCMSRPALKLRSWPLT

SEQ ID NO: 29934 - protein, 37 aa, Artificial Sequence
  Quasi-synthetic sequence derived from human genome
LIPYLHFLIFLFILRCLEMNCRKKLMRKDPVFRISPR

SEQ ID NO: 29935 - protein, 37 aa, Artificial Sequence
  Quasi-synthetic sequence derived from human genome
ARRGPFPLALLLLFLLGPRLVLAISFHLPINSRKCLR

SEQ ID NO: 29936 - protein, 37 aa, Artificial Sequence
  Quasi-synthetic sequence derived from human genome
IRKHVRKNYMKFKAKFSLIQFHRIIESAILSFTSLIK

SEQ ID NO: 29937 - protein, 37 aa, Artificial Sequence
  Quasi-synthetic sequence derived from human genome
RLSPVPVPRAVPVKRPRVTVPLVRRVKTNVPVKLFAR

SEQ ID NO: 29938 - protein, 37 aa, Artificial Sequence
  Quasi-synthetic sequence derived from human genome
FNKYISRPRRVELAVMLNLTERHIKIWFQNRRMKWKK

SEQ ID NO: 29939 - protein, 37 aa, Artificial Sequence
  Quasi-synthetic sequence derived from human genome
SFRDFFFSRGRFSSGFRRTLILSSGFRLVKKKLYSLI

SEQ ID NO: 29940 - protein, 37 aa, Artificial Sequence
  Quasi-synthetic sequence derived from human genome
ANASIWWIIRGPVILSILINFILFINILRILMRKLRT

SEQ ID NO: 29941 - protein, 37 aa, Artificial Sequence
  Quasi-synthetic sequence derived from human genome
LKQKAPQQYRIRAKLRSYKPRRLFQSVKLHCPKCHLL

SEQ ID NO: 29942 - protein, 37 aa, Artificial Sequence
  Quasi-synthetic sequence derived from human genome
FRKFQVWRLVTNFLFFGPLGFSFFFNMLFVFRYCRML

SEQ ID NO: 29943 - protein, 37 aa, Artificial Sequence
  Quasi-synthetic sequence derived from human genome
KFLLAFLVPLAIIASSHAAVSLRLQHRGRRRPGRFVR

SEQ ID NO: 29944 - protein, 37 aa, Artificial Sequence
  Quasi-synthetic sequence derived from human genome
FRQLNLYGFRKRRQCTFRTFTRIFSAKRLVSILNKLE

SEQ ID NO: 29945 - protein, 37 aa, Artificial Sequence
  Quasi-synthetic sequence derived from human genome
LPRKKLKHIRQGTNKGLIKKKLKNMLAAVVTKKKTHK

SEQ ID NO: 29946 - protein, 37 aa, Artificial Sequence
  Quasi-synthetic sequence derived from human genome
VLVAISVTLLLVVLALGGVVWYQHRQRKLRRNRRSIL

SEQ ID NO: 29947 - protein, 37 aa, Artificial Sequence
  Quasi-synthetic sequence derived from human genome
LWLRAKFQRLLFKLGCYIQKNCGKFLVVGLLIFGAFA

SEQ ID NO: 29948 - protein, 37 aa, Artificial Sequence
  Quasi-synthetic sequence derived from human genome
CKRKQLLKPVFLNSWIDLRATYKLFYRRKPKGLSGAL

SEQ ID NO: 29949 - protein, 37 aa, Artificial Sequence
  Quasi-synthetic sequence derived from human genome
LARKAFAKKQQQLSALKVLQRNCAAYLKLRHWQWWRV

SEQ ID NO: 29950 - protein, 37 aa, Artificial Sequence
  Quasi-synthetic sequence derived from human genome
VKYFFFLSERKMSKKFVELKKAGLLVWNLIVIICRIF

SEQ ID NO: 29951 - protein, 37 aa, Artificial Sequence
  Quasi-synthetic sequence derived from human genome
LRRGRPKRRRKPQPHSGSVLALPLRSRKIRKQLRSVV

SEQ ID NO: 29952 - protein, 37 aa, Artificial Sequence
  Quasi-synthetic sequence derived from human genome
VRKKLEQHIRRRLIQRRWGLPRRIHESLSLLRPQSKI

SEQ ID NO: 29953 - protein, 37 aa, Artificial Sequence
  Quasi-synthetic sequence derived from human genome
LRRPGAPASWIWWRMLRQVLRRGLQSFCHRLGLCVSR

SEQ ID NO: 29954 - protein, 37 aa, Artificial Sequence
  Quasi-synthetic sequence derived from human genome
WLQKVKYHRLKGATLTLQRYCRGHLARRLAEHLRRIR

SEQ ID NO: 29955 - protein, 37 aa, Artificial Sequence
  Quasi-synthetic sequence derived from human genome
VRMVRAATLIQALWKGYLVRSLLRSKKKRGKGKAKDK

SEQ ID NO: 29956 - protein, 37 aa, Artificial Sequence
  Quasi-synthetic sequence derived from human genome
YNPVIYVFMIRKFRRSLLQLLCLRLLRCQRPAKDLPA

SEQ ID NO: 29957 - protein, 37 aa, Artificial Sequence
  Quasi-synthetic sequence derived from human genome
KKLVPVRRRAWGQLCLPPQRLRVTRHPLIPAPVLGLL

SEQ ID NO: 29958 - protein, 37 aa, Artificial Sequence
  Quasi-synthetic sequence derived from human genome
LKAGRRWNKYFKSRRPLFTGGLIGGLFTYVLFWTFLY

SEQ ID NO: 29959 - protein, 37 aa, Artificial Sequence
  Quasi-synthetic sequence derived from human genome
LMANVLLLVPPLMKPIVYCVKTKQIRVRVVAKLCQWK

SEQ ID NO: 29960 - protein, 37 aa, Artificial Sequence
  Quasi-synthetic sequence derived from human genome
NKLRNIRYGFNTILVILIWRIFIARSQMARNIWYFVV

SEQ ID NO: 29961 - protein, 37 aa, Artificial Sequence
  Quasi-synthetic sequence derived from human genome
RMSRNFVRYVQGLKKKKVIVIPVGIGPHANLKQIRLI

SEQ ID NO: 29962 - protein, 37 aa, Artificial Sequence
  Quasi-synthetic sequence derived from human genome
LTLLIALLSINGFAYFIRRRINKIQLIKGPNRILLTL

SEQ ID NO: 29963 - protein, 37 aa, Artificial Sequence
  Quasi-synthetic sequence derived from human genome
SFLILLGIGIYALWKRSIQSIQKTLLFVITLYKLYKK

SEQ ID NO: 29964 - protein, 37 aa, Artificial Sequence
  Quasi-synthetic sequence derived from human genome
KKVINKGLFFLGSLIAISSTYLLIHYMSPRSFLRLRR

SEQ ID NO: 29965 - protein, 37 aa, Artificial Sequence
  Quasi-synthetic sequence derived from human genome
SVFFGRVYLGLSIALRFPALVLYIVFIFAMKKKFQGK

SEQ ID NO: 29966 - protein, 37 aa, Artificial Sequence
  Quasi-synthetic sequence derived from human genome
RYYYNKRILHKTKGKRFTYKFNFSKLIVVNYPLWEVR

SEQ ID NO: 29967 - protein, 37 aa, Artificial Sequence
  Quasi-synthetic sequence derived from human genome
CQRKLKHRLRLDSYLLKPVQRITKYQLLLKELLKYSK

SEQ ID NO: 29968 - protein, 37 aa, Artificial Sequence
  Quasi-synthetic sequence derived from human genome
KLRSWPLTVLYYLLPFGALRPLSRVGWRPVSRVALYK

SEQ ID NO: 29969 - protein, 37 aa, Artificial Sequence
  Quasi-synthetic sequence derived from human genome
RTLLCLCRVAVRRALGKHRLHLIPSLPLPDPIKKFLL

SEQ ID NO: 29970 - protein, 37 aa, Artificial Sequence
  Quasi-synthetic sequence derived from human genome
LFQWVYQRRGLVHLCCSKLVNYLTPIKYLRKSLKIIY

SEQ ID NO: 29971 - protein, 37 aa, Artificial Sequence
  Quasi-synthetic sequence derived from human genome
HNKKHLILAFCAGVLLTLLLIAFIFLIIKSYRKYHSK

SEQ ID NO: 29972 - protein, 37 aa, Artificial Sequence
  Quasi-synthetic sequence derived from human genome
LTLLVGNHTQRTAILGLWKIARKWMRRKMGKWPAVVV

SEQ ID NO: 29973 - protein, 37 aa, Artificial Sequence
  Quasi-synthetic sequence derived from human genome
TRTLTQKRYLVKFICLSIWGLSLLLALPVLLFRRTVY

SEQ ID NO: 29974 - protein, 37 aa, Artificial Sequence
  Quasi-synthetic sequence derived from human genome
REYVKKRQAAIKLEAHWRGALARKAIQRRKWAVRIIR

SEQ ID NO: 29975 - protein, 37 aa, Artificial Sequence
  Quasi-synthetic sequence derived from human genome
AKALKAKKAVLKGVHSHKKKKIRTSPTFRRPKTLRLR

SEQ ID NO: 29976 - protein, 37 aa, Artificial Sequence
  Quasi-synthetic sequence derived from human genome
LRRQKKIFSKQQGKAFQRARQMNIDVATWVRLLRRLI

SEQ ID NO: 29977 - protein, 37 aa, Artificial Sequence
  Quasi-synthetic sequence derived from human genome
LKHTIKLLTVIKWHGPKCNKLNSKFWKRLQYEMPFKR

SEQ ID NO: 29978 - protein, 37 aa, Artificial Sequence
  Quasi-synthetic sequence derived from human genome
KYWRRVLAQRKLLMLKKEKLEKVQNKAASLIQGYWRR

SEQ ID NO: 29979 - protein, 37 aa, Artificial Sequence
  Quasi-synthetic sequence derived from human genome
VLLLLLLGLLRPLRRRSCLLAPGKGPPALGASRGPRR

SEQ ID NO: 29980 - protein, 37 aa, Artificial Sequence
  Quasi-synthetic sequence derived from human genome
RKWKAFSVWRKNVRSKKITGCQKSLQKNLFIVNPHLR

SEQ ID NO: 29981 - protein, 37 aa, Artificial Sequence
  Quasi-synthetic sequence derived from human genome
FTWLRSPVQNFCYIFWKRYRFKLIAFMVISIIALMLF

SEQ ID NO: 29982 - protein, 37 aa, Artificial Sequence
  Quasi-synthetic sequence derived from human genome
MAKFRRRTCIILALFILFIFSLMMGLKMLRPNTATFG

SEQ ID NO: 29983 - protein, 37 aa, Artificial Sequence
  Quasi-synthetic sequence derived from human genome
LFRILGSERKKTIANYLVWRMVYSRIPNLSRRFQYRW

SEQ ID NO: 29984 - protein, 37 aa, Artificial Sequence
  Quasi-synthetic sequence derived from human genome
LVKKALRVLPTVTWRGLKSVPPNSRFWAKMRYHMPVK

SEQ ID NO: 29985 - protein, 37 aa, Artificial Sequence
  Quasi-synthetic sequence derived from human genome
ALTVIAGLVVIFMMLGGTFLYWRGRRIQNKRAMRRYL

SEQ ID NO: 29986 - protein, 37 aa, Artificial Sequence
  Quasi-synthetic sequence derived from human genome
MSLLAIAVDRYLRVKLTVRYKRVTTHRRIWLALGLCW

SEQ ID NO: 29987 - protein, 37 aa, Artificial Sequence
  Quasi-synthetic sequence derived from human genome
LVIRAAVAGFFAVLFLWRSFRSVTSRLYVRREKKFAV

SEQ ID NO: 29988 - protein, 37 aa, Artificial Sequence
  Quasi-synthetic sequence derived from human genome
SRVSKKNIFLLFKKLCSFRYRRDLLRLSYGEAKKAAR

SEQ ID NO: 29989 - protein, 37 aa, Artificial Sequence
  Quasi-synthetic sequence derived from human genome
TLLLVLQYFGPLCFIFICYFKIYIRLKRRNNMMDKMR

SEQ ID NO: 29990 - protein, 37 aa, Artificial Sequence
  Quasi-synthetic sequence derived from human genome
TMKLLKLRRNIVKLSLYRHFTNTLILAVAASIVFIIW

SEQ ID NO: 29991 - protein, 37 aa, Artificial Sequence
  Quasi-synthetic sequence derived from human genome
QGTYTFLTCFAGFWLIWGLIVLLCCFCSFLRRRLKRR

SEQ ID NO: 29992 - protein, 37 aa, Artificial Sequence
  Quasi-synthetic sequence derived from human genome
LLLILRGQTRHQVRKGVAVRARPWRKNLQEVFGKRWL

SEQ ID NO: 29993 - protein, 37 aa, Artificial Sequence
  Quasi-synthetic sequence derived from human genome
SWVRMWCVRQRYCRLLNAVRIIQVYWRWHSCHSRVFI

SEQ ID NO: 29994 - protein, 37 aa, Artificial Sequence
  Quasi-synthetic sequence derived from human genome
CRKKAKPRIFFLFNDILVYGSIVLNKRKYRSQHIIPL

SEQ ID NO: 29995 - protein, 37 aa, Artificial Sequence
  Quasi-synthetic sequence derived from human genome
KLLKSHRVLKWKADKSLSYNSRFWKNLLYLMPAKTVK

SEQ ID NO: 29996 - protein, 37 aa, Artificial Sequence
  Quasi-synthetic sequence derived from human genome
RNRRTSVRKAAQRYLMDYLNPLILSYVKRKRFHRLSL

SEQ ID NO: 29997 - protein, 37 aa, Artificial Sequence
  Quasi-synthetic sequence derived from human genome
KGFIQKRKFQEIKNSTIKIQAMWRRYRAKKYLCKVKA

SEQ ID NO: 29998 - protein, 37 aa, Artificial Sequence
  Quasi-synthetic sequence derived from human genome
RRAKRKVTRMILIVAALFCLCWMPHHALILCVWFGQF

SEQ ID NO: 29999 - protein, 37 aa, Artificial Sequence
  Quasi-synthetic sequence derived from human genome
RKRGKNPMKAVGLAWYSLYTRTWLGYLFYRQQLRRAR

SEQ ID NO: 30000 - protein, 37 aa, Artificial Sequence
  Quasi-synthetic sequence derived from human genome
RWLVVRLATKWCQRKLQAELKIGSFRFFWIQNVSLKF

SEQ ID NO: 30001 - protein, 38 aa, Artificial Sequence
  Quasi-synthetic sequence derived from human genome
KRKKKKKFCYLCILLLIVLFILLCCLYRLCKKSKPIKK

SEQ ID NO: 30002 - protein, 38 aa, Artificial Sequence
  Quasi-synthetic sequence derived from human genome
IFLLLVILAMGLWVIRVQKRHKMPRMKKLMRNRMKLRK

SEQ ID NO: 30003 - protein, 38 aa, Artificial Sequence
  Quasi-synthetic sequence derived from human genome
TWLRVRKARPQLILSRRPRRRLGSLRWCGRRRLRWRLL

SEQ ID NO: 30004 - protein, 38 aa, Artificial Sequence
  Quasi-synthetic sequence derived from human genome
RLIPIIVLLLQKAWRGTLARWRCRRLRAIYTIMRWFRR

SEQ ID NO: 30005 - protein, 38 aa, Artificial Sequence
  Quasi-synthetic sequence derived from human genome
RIYAVSTLLLFLLFFLFRLLLRFLRLCRSFYITCRRLR

SEQ ID NO: 30006 - protein, 38 aa, Artificial Sequence
  Quasi-synthetic sequence derived from human genome
RNIPRWTHLLRLLRLIILLRIFHLFHQKRQLEKLIRRR

SEQ ID NO: 30007 - protein, 38 aa, Artificial Sequence
  Quasi-synthetic sequence derived from human genome
LIYWPRFIRHKCKQRFTKITQYLIRIRKLTLKRQRKLV

SEQ ID NO: 30008 - protein, 38 aa, Artificial Sequence
  Quasi-synthetic sequence derived from human genome
KGLLIFLLLVILAMGLWVIRVQKRHKMPRMKKLMRNRM

SEQ ID NO: 30009 - protein, 38 aa, Artificial Sequence
  Quasi-synthetic sequence derived from human genome
RTGRRKSWRLEFLFLRRRCFLLTFYLWFLFFSRFLLML

SEQ ID NO: 30010 - protein, 38 aa, Artificial Sequence
  Quasi-synthetic sequence derived from human genome
KSKFSRYWRRWNRFCRRKCRAAVKSNVFYWLVIFLVFL

SEQ ID NO: 30011 - protein, 38 aa, Artificial Sequence
  Quasi-synthetic sequence derived from human genome
AHLKRLVKLHIKRHYHKKFWKLGAVIFFFIIVLVLMQR

SEQ ID NO: 30012 - protein, 38 aa, Artificial Sequence
  Quasi-synthetic sequence derived from human genome
WRMYVVRRRYKIRRAATIVLQSYLRGFLARNRYRKILR

SEQ ID NO: 30013 - protein, 38 aa, Artificial Sequence
  Quasi-synthetic sequence derived from human genome
RLCLRLLLLLGYRRRCPPLLRGLVQRWRYGKVCLRSLL

SEQ ID NO: 30014 - protein, 38 aa, Artificial Sequence
  Quasi-synthetic sequence derived from human genome
HRLLKRLLGPKLRRFLKPQGHPRLLLWFKRGLALAAFL

SEQ ID NO: 30015 - protein, 38 aa, Artificial Sequence
  Quasi-synthetic sequence derived from human genome
FLARKQYRKVLYCVVIIQKNYRAFLLRRRFLHLKKAAI

SEQ ID NO: 30016 - protein, 38 aa, Artificial Sequence
  Quasi-synthetic sequence derived from human genome
VINFLAKQRLRKRVNAALVIQKYWRRVLAQRKLLMLKK

SEQ ID NO: 30017 - protein, 38 aa, Artificial Sequence
  Quasi-synthetic sequence derived from human genome
MPFRRKIYYLPRRYKFMSRIDKQISRFRRWLPKKPMRL

SEQ ID NO: 30018 - protein, 38 aa, Artificial Sequence
  Quasi-synthetic sequence derived from human genome
RFLKHAGKWSLRWFLSPRWILQFRRWARKWSRFTRSSF

SEQ ID NO: 30019 - protein, 38 aa, Artificial Sequence
  Quasi-synthetic sequence derived from human genome
KSWRRRSCWRKWKQLSRLQRNMILFLLAFLLFCGLLFY

SEQ ID NO: 30020 - protein, 38 aa, Artificial Sequence
  Quasi-synthetic sequence derived from human genome
IQAIFRGKKARRHLKMMHIAATLIQRRFRTLMMRRRFL

SEQ ID NO: 30021 - protein, 38 aa, Artificial Sequence
  Quasi-synthetic sequence derived from human genome
LIVRVLVRAHRHRGLRPRRQKALRMILAVVLVFFVCWL

SEQ ID NO: 30022 - protein, 38 aa, Artificial Sequence
  Quasi-synthetic sequence derived from human genome
KRKKRIKRRALLFLSYILTHFIFLALLLILIVLLRHTD

SEQ ID NO: 30023 - protein, 38 aa, Artificial Sequence
  Quasi-synthetic sequence derived from human genome
ILRGKMMQRRPRSAEVKYFYFFKILLRLRLAILKYLFI

SEQ ID NO: 30024 - protein, 38 aa, Artificial Sequence
  Quasi-synthetic sequence derived from human genome
KRCNRRLKSQILLKKYLMKRRWKKNFIAVSAANRFKKI

SEQ ID NO: 30025 - protein, 38 aa, Artificial Sequence
  Quasi-synthetic sequence derived from human genome
RKRMGLKMLMMMALLVPLVYTIKRHKWSVLKSRKLAYR

SEQ ID NO: 30026 - protein, 38 aa, Artificial Sequence
  Quasi-synthetic sequence derived from human genome
KKKKKRYLRASSNRNFLLTMRPFLKRAILVLSYVLVIL

SEQ ID NO: 30027 - protein, 38 aa, Artificial Sequence
  Quasi-synthetic sequence derived from human genome
RRKKKKTIKMLMLVVVLFALCWFPLNCYVLLLSSKVIR

SEQ ID NO: 30028 - protein, 38 aa, Artificial Sequence
  Quasi-synthetic sequence derived from human genome
RIPLLRKRRFQLGRSMNLRARKNRSQIVLFQKRRFQFF

SEQ ID NO: 30029 - protein, 38 aa, Artificial Sequence
  Quasi-synthetic sequence derived from human genome
RLRRVIAAFYFPKREKKRILFLYNDLLKKRAAFTKLRR

SEQ ID NO: 30030 - protein, 38 aa, Artificial Sequence
  Quasi-synthetic sequence derived from human genome
AGMKRALGRRKGVWLRLRKILFCVLGLYIAIPFLIKLC

SEQ ID NO: 30031 - protein, 38 aa, Artificial Sequence
  Quasi-synthetic sequence derived from human genome
KLLKKRSKQPLGEVKRRLSLYLTKIHFWLPVLKMIRKK

SEQ ID NO: 30032 - protein, 38 aa, Artificial Sequence
  Quasi-synthetic sequence derived from human genome
SKSKLSRRWRRWNRFNRRRCRAAVKSVTFYWLVIVLVF

SEQ ID NO: 30033 - protein, 38 aa, Artificial Sequence
  Quasi-synthetic sequence derived from human genome
PLVYALASRHFRARFRRLWPCGRRRRHRARRALRRVRP

SEQ ID NO: 30034 - protein, 38 aa, Artificial Sequence
  Quasi-synthetic sequence derived from human genome
KLSRRWRRWNRFNRRRCRAAVKSVTFYWLVIVLVFLNT

SEQ ID NO: 30035 - protein, 38 aa, Artificial Sequence
  Quasi-synthetic sequence derived from human genome
KYFFSPTLFRVIRLARIGRILRLIRGAKGIRTLLFALM

SEQ ID NO: 30036 - protein, 38 aa, Artificial Sequence
  Quasi-synthetic sequence derived from human genome
KRSRIPLLRKRRFQLGRSMNPRARKNRSRIPLLRKRRF

SEQ ID NO: 30037 - protein, 38 aa, Artificial Sequence
  Quasi-synthetic sequence derived from human genome
AWWRGVLVRRTLLVAALRAWMIQCWWRTLVQRRIRQRR

SEQ ID NO: 30038 - protein, 38 aa, Artificial Sequence
  Quasi-synthetic sequence derived from human genome
IYFANIGFFRRKLIDAVGFSPLRILRKRNKALRKIRKL

SEQ ID NO: 30039 - protein, 38 aa, Artificial Sequence
  Quasi-synthetic sequence derived from human genome
LFRVIRLARIGRILRLIRAAKGIRTLLFALMMSLPALF

SEQ ID NO: 30040 - protein, 38 aa, Artificial Sequence
  Quasi-synthetic sequence derived from human genome
YRAFLLRRRFLHLKKAAIVFQKQLRGQIARRVYRQLLA

SEQ ID NO: 30041 - protein, 38 aa, Artificial Sequence
  Quasi-synthetic sequence derived from human genome
LTLQRCLRGFFIKRRFRSLRHKIILLQSRARGYLARQR

SEQ ID NO: 30042 - protein, 38 aa, Artificial Sequence
  Quasi-synthetic sequence derived from human genome
LIAVRLASLNQILDPWVYLLLRKILLRKFCQMRKRRLR

SEQ ID NO: 30043 - protein, 38 aa, Artificial Sequence
  Quasi-synthetic sequence derived from human genome
LLRRVTRNLVRNKLAVITRLLQNLIMGLFLLFFVLRVR

SEQ ID NO: 30044 - protein, 38 aa, Artificial Sequence
  Quasi-synthetic sequence derived from human genome
IRNIGIWFFWIRLYKIRRGRTRPQALLFLCMILLLIVL

SEQ ID NO: 30045 - protein, 38 aa, Artificial Sequence
  Quasi-synthetic sequence derived from human genome
RIPLLRKRRFQLYRSMNSRARKNRSQIVLFQKRRFHFF

SEQ ID NO: 30046 - protein, 38 aa, Artificial Sequence
  Quasi-synthetic sequence derived from human genome
FLGHRLLKRLLGPKLRRFLKPQGHPRLLLWFKRDPRPW

SEQ ID NO: 30047 - protein, 38 aa, Artificial Sequence
  Quasi-synthetic sequence derived from human genome
LKKKRRNFAELKIKRLRKKFAQKMLRKARRKLIYEKAK

SEQ ID NO: 30048 - protein, 38 aa, Artificial Sequence
  Quasi-synthetic sequence derived from human genome
KQLRRQMWWRGCKIKAIMALVAAILLLVIIILIVMKYR

SEQ ID NO: 30049 - protein, 38 aa, Artificial Sequence
  Quasi-synthetic sequence derived from human genome
LKLTCSAFRLQRALRFLLGRLPWRVASGARRFRRWLNR

SEQ ID NO: 30050 - protein, 38 aa, Artificial Sequence
  Quasi-synthetic sequence derived from human genome
RALRAPRKKIHRRVLKKNPLKNLRIMLKLNPYAKTMRR

SEQ ID NO: 30051 - protein, 38 aa, Artificial Sequence
  Quasi-synthetic sequence derived from human genome
KPKLSKFILISSLAILLMVSLLLLSLWKLWRVKKFLIP

SEQ ID NO: 30052 - protein, 38 aa, Artificial Sequence
  Quasi-synthetic sequence derived from human genome
LFRVIRLARIGRILRLIKGAKGIRTLLFALMMSLPALF

SEQ ID NO: 30053 - protein, 38 aa, Artificial Sequence
  Quasi-synthetic sequence derived from human genome
LRRIILLQRWFRVLLCRQHFLHLRQASVIIQRFWRNYL

SEQ ID NO: 30054 - protein, 38 aa, Artificial Sequence
  Quasi-synthetic sequence derived from human genome
RRFRTLMMRRRFLSLKKTAILIQRKYRAHLCTKHHLQF

SEQ ID NO: 30055 - protein, 38 aa, Artificial Sequence
  Quasi-synthetic sequence derived from human genome
RFRSLLVRRRFISLKKATIFVQRKYRATICAKHKLYQF

SEQ ID NO: 30056 - protein, 38 aa, Artificial Sequence
  Quasi-synthetic sequence derived from human genome
FKRAFLRLLRCQCRRRRRRRPLWRVYGHHWRASTSGLR

SEQ ID NO: 30057 - protein, 38 aa, Artificial Sequence
  Quasi-synthetic sequence derived from human genome
LRIRCVARKFLYLWIRMTFGRVFPSKARFYYEQRLLRK

SEQ ID NO: 30058 - protein, 38 aa, Artificial Sequence
  Quasi-synthetic sequence derived from human genome
IVSFYVPFIVTLLVYIKIYIVLRRRRKRVNTKRSSRAF

SEQ ID NO: 30059 - protein, 38 aa, Artificial Sequence
  Quasi-synthetic sequence derived from human genome
RILKVLLWLLAILTGLIAGKFLFHQRLFGQLLRLKMFR

SEQ ID NO: 30060 - protein, 38 aa, Artificial Sequence
  Quasi-synthetic sequence derived from human genome
LFRVIRLARIGRVLRLIRGAKGIRTLLFALMMSLPALF

SEQ ID NO: 30061 - protein, 38 aa, Artificial Sequence
  Quasi-synthetic sequence derived from human genome
LRVKRSVTRIKKRSRSVFYRLTILILVFAVSWMPLHLF

SEQ ID NO: 30062 - protein, 38 aa, Artificial Sequence
  Quasi-synthetic sequence derived from human genome
YIFFDIKLLRNIPRWTHLVRLLRLIILIRIFHLLHQKR

SEQ ID NO: 30063 - protein, 38 aa, Artificial Sequence
  Quasi-synthetic sequence derived from human genome
KYRKLVKKTRFLRRKVQEGRLRRKQIKFEKDLRRIWLK

SEQ ID NO: 30064 - protein, 38 aa, Artificial Sequence
  Quasi-synthetic sequence derived from human genome
KYRRRPALGWLARLLRSRAGSRKRPLTLLQRAGLLLLL

SEQ ID NO: 30065 - protein, 38 aa, Artificial Sequence
  Quasi-synthetic sequence derived from human genome
LLPLRMPLSRWQRRLRRAARRQVLSGHLPFCRFRLRYP

SEQ ID NO: 30066 - protein, 38 aa, Artificial Sequence
  Quasi-synthetic sequence derived from human genome
MRRLRRLAHLVLFCPFSKRLQGRLPGLRVRCIFLAWLG

SEQ ID NO: 30067 - protein, 38 aa, Artificial Sequence
  Quasi-synthetic sequence derived from human genome
WRRYGKLSRHLMKVKLKKYTKFLFVRDPFVRLISAFRS

SEQ ID NO: 30068 - protein, 38 aa, Artificial Sequence
  Quasi-synthetic sequence derived from human genome
LFRVIRLARIGRILRLVKGAKGIRTLLFALMMSLPALF

SEQ ID NO: 30069 - protein, 38 aa, Artificial Sequence
  Quasi-synthetic sequence derived from human genome
SRIPLLRKRRFQLYRSTNPRARKNRSRIPLLRKRRFQL

SEQ ID NO: 30070 - protein, 38 aa, Artificial Sequence
  Quasi-synthetic sequence derived from human genome
MKIFKCYFKHTLQQKVFILFLTLWLLSLLKLLNVRRLF

SEQ ID NO: 30071 - protein, 38 aa, Artificial Sequence
  Quasi-synthetic sequence derived from human genome
RRLRKNLRALVVVHATWYVKAFLALLRPFISSKFTRKI

SEQ ID NO: 30072 - protein, 38 aa, Artificial Sequence
  Quasi-synthetic sequence derived from human genome
LVRLLRLIILIRIFHLLHQKRQLEKLMRRLVSENKRRY

SEQ ID NO: 30073 - protein, 38 aa, Artificial Sequence
  Quasi-synthetic sequence derived from human genome
IRLKNIRKVYGRCMWYRLRLLKPQPNIIPTVKKIVLLA

SEQ ID NO: 30074 - protein, 38 aa, Artificial Sequence
  Quasi-synthetic sequence derived from human genome
FFSTLVLLLSIAIFQRQKRRKFWKAKNLQHIPLKKGKR

SEQ ID NO: 30075 - protein, 38 aa, Artificial Sequence
  Quasi-synthetic sequence derived from human genome
RRRNTPFHERFFRFLLRKLYVFRRSFLMTCISLRNLIL

SEQ ID NO: 30076 - protein, 38 aa, Artificial Sequence
  Quasi-synthetic sequence derived from human genome
KTRVCRRLRRANRVLRARCRRAVKSNACYWAVLLLVFL

SEQ ID NO: 30077 - protein, 38 aa, Artificial Sequence
  Quasi-synthetic sequence derived from human genome
LRRLRAVRLRSGAKALGKARRKVTVLVLVVLAVCLLCW

SEQ ID NO: 30078 - protein, 38 aa, Artificial Sequence
  Quasi-synthetic sequence derived from human genome
KLRAACIRIQKTIRGWLLRKKYLRMRKAAITMQRYVRG

SEQ ID NO: 30079 - protein, 38 aa, Artificial Sequence
  Quasi-synthetic sequence derived from human genome
RLGLLGRRGFSGRLGGYWKTWIFWKTWIFWKTWIFRKT

SEQ ID NO: 30080 - protein, 38 aa, Artificial Sequence
  Quasi-synthetic sequence derived from human genome
VHSLNLLAKQGLRLLRGLRRRNVQKKVALAKKLLAKLR

SEQ ID NO: 30081 - protein, 38 aa, Artificial Sequence
  Quasi-synthetic sequence derived from human genome
YKARKFFLFYRQQKWASGVIAIAWLLYCHKTRLKKILK

SEQ ID NO: 30082 - protein, 38 aa, Artificial Sequence
  Quasi-synthetic sequence derived from human genome
WRGFHWRQKFLRVKRSAICIQSWWRGTLGRRKAAKRKW

SEQ ID NO: 30083 - protein, 38 aa, Artificial Sequence
  Quasi-synthetic sequence derived from human genome
LRILHISVMGGMIALLLSILCLVMILYTRRRWCKRRRV

SEQ ID NO: 30084 - protein, 38 aa, Artificial Sequence
  Quasi-synthetic sequence derived from human genome
FVYLNRKIVQVMRKQKTINRFLMRKRLLFPALVTLLIS

SEQ ID NO: 30085 - protein, 38 aa, Artificial Sequence
  Quasi-synthetic sequence derived from human genome
LMTILINFLIFIRILGILLSKLRTRQMRCRDYRLRLAR

SEQ ID NO: 30086 - protein, 38 aa, Artificial Sequence
  Quasi-synthetic sequence derived from human genome
PRAARPPLLLRPVKLLRRRFRLLLALAVVSVGLWTLYL

SEQ ID NO: 30087 - protein, 38 aa, Artificial Sequence
  Quasi-synthetic sequence derived from human genome
ARKGKRKTVKAVIDRFLRLHCGLWVRRKAGYKKKLWKK

SEQ ID NO: 30088 - protein, 38 aa, Artificial Sequence
  Quasi-synthetic sequence derived from human genome
RRSQRASFKRARRPGARALRLVLGIVLLFWACFLPFWL

SEQ ID NO: 30089 - protein, 38 aa, Artificial Sequence
  Quasi-synthetic sequence derived from human genome
IKQIRARRKTARMLMIVLLVFAICYLPISILNVLKRVF

SEQ ID NO: 30090 - protein, 38 aa, Artificial Sequence
  Quasi-synthetic sequence derived from human genome
WLSARLWKWLKSPRSWRLGLALLLGGALLFWVLLHRRW

SEQ ID NO: 30091 - protein, 38 aa, Artificial Sequence
  Quasi-synthetic sequence derived from human genome
LKTYLKRFKVMKIKVLRSWCRQILKGLQFLHTRTPPII

SEQ ID NO: 30092 - protein, 38 aa, Artificial Sequence
  Quasi-synthetic sequence derived from human genome
KKIIQKHFEKKKDIRRGIGYLKLICFLIPFLLSLKKKM

SEQ ID NO: 30093 - protein, 38 aa, Artificial Sequence
  Quasi-synthetic sequence derived from human genome
RIPLLRKHRFQLYRSMNSRARKNRSQIVLFQKRRFHFF

SEQ ID NO: 30094 - protein, 38 aa, Artificial Sequence
  Quasi-synthetic sequence derived from human genome
FKERLKLFFIKNQRSSLRIRLFNFSLKLLSCLLYIIRV

SEQ ID NO: 30095 - protein, 38 aa, Artificial Sequence
  Quasi-synthetic sequence derived from human genome
RKYKKNIKALYIVHPTMFIKTLLILFKPLISFKFGQKI

SEQ ID NO: 30096 - protein, 38 aa, Artificial Sequence
  Quasi-synthetic sequence derived from human genome
KFKLFTLVSACIPVFRLARRRKKILFYCHFPDLLLTKR

SEQ ID NO: 30097 - protein, 38 aa, Artificial Sequence
  Quasi-synthetic sequence derived from human genome
KIKTFLSLVWKRRILFFVVTLVSVFLVWKFTYAHKYLL

SEQ ID NO: 30098 - protein, 38 aa, Artificial Sequence
  Quasi-synthetic sequence derived from human genome
AVIRGGATRAAGVFYPWRFRLLCLLRRWLPRPRAWFIR

SEQ ID NO: 30099 - protein, 38 aa, Artificial Sequence
  Quasi-synthetic sequence derived from human genome
LLIWVPVKVILHKKRYIYRKIKGWRPVLMMCVVLTTLP

SEQ ID NO: 30100 - protein, 38 aa, Artificial Sequence
  Quasi-synthetic sequence derived from human genome
RIRYEFKAKNIKKKKVSIMVSVDGVKVILKKKKKLLLL

SEQ ID NO: 30101 - protein, 38 aa, Artificial Sequence
  Quasi-synthetic sequence derived from human genome
WRRYSTRQRFLKLKYYSIILQSRIRMIIAVTSYKRYLW

SEQ ID NO: 30102 - protein, 38 aa, Artificial Sequence
  Quasi-synthetic sequence derived from human genome
RKLFIQRAKKIDKISRIGFPMAFLIFNMFYWIIYKIVR

SEQ ID NO: 30103 - protein, 38 aa, Artificial Sequence
  Quasi-synthetic sequence derived from human genome
LRRRPARTLGLLLLVVLGFLVLRRLDWSTLVPLRLRHR

SEQ ID NO: 30104 - protein, 38 aa, Artificial Sequence
  Quasi-synthetic sequence derived from human genome
RYQQLGAGLKVLFKKTHRILRRLFNLCKRCHRQPRFRL

SEQ ID NO: 30105 - protein, 38 aa, Artificial Sequence
  Quasi-synthetic sequence derived from human genome
RKLTHLRKRIHRPRRRTTRRWKRWFKFRKRKGEKRPRP

SEQ ID NO: 30106 - protein, 38 aa, Artificial Sequence
  Quasi-synthetic sequence derived from human genome
RRLRKNLKSLIIVHPSWFIRTVLAISRPFISVKFINKI

SEQ ID NO: 30107 - protein, 38 aa, Artificial Sequence
  Quasi-synthetic sequence derived from human genome
TPLLPLLLRLLLSCLLLPAARLARQYLLPLLRRLARRL

SEQ ID NO: 30108 - protein, 38 aa, Artificial Sequence
  Quasi-synthetic sequence derived from human genome
ILKRALKVKQAMLQLYVLKLLKLQTKYLGRQWRKSNMK

SEQ ID NO: 30109 - protein, 38 aa, Artificial Sequence
  Quasi-synthetic sequence derived from human genome
LKHLCRLKIRKCMGRLHLRCPVFMSFLPLPNRLKAYVL

SEQ ID NO: 30110 - protein, 38 aa, Artificial Sequence
  Quasi-synthetic sequence derived from human genome
KLLILLIGTWALFFRKRRADMPRVFVFRALLLVLIFLF

SEQ ID NO: 30111 - protein, 38 aa, Artificial Sequence
  Quasi-synthetic sequence derived from human genome
FSILTVRSALFALRYNILTLMRMLSLKSLKKQMKKVKK

SEQ ID NO: 30112 - protein, 38 aa, Artificial Sequence
  Quasi-synthetic sequence derived from human genome
VLVLLVSLGVAIHLCCRRRRARLRFMKQKFNIVCLKIS

SEQ ID NO: 30113 - protein, 38 aa, Artificial Sequence
  Quasi-synthetic sequence derived from human genome
FLTALLWRGRIPGRQWIGKHRRPRFVSLRAKQNMIRRL

SEQ ID NO: 30114 - protein, 38 aa, Artificial Sequence
  Quasi-synthetic sequence derived from human genome
LIAAGVIGGLFILVIVGLTFAVYVRRKSIKKKRALRRF

SEQ ID NO: 30115 - protein, 38 aa, Artificial Sequence
  Quasi-synthetic sequence derived from human genome
FKERLKLFFIKNQRSSLRIRLFNFSLKLLTCLLYIVRV

SEQ ID NO: 30116 - protein, 38 aa, Artificial Sequence
  Quasi-synthetic sequence derived from human genome
KLLILLLGSWALFFRRPKASLPRVFVLRALLMVLVFLL

SEQ ID NO: 30117 - protein, 38 aa, Artificial Sequence
  Quasi-synthetic sequence derived from human genome
LRLRHLRRPRVARLLCLGVWALILVFAVPAARVHRPSR

SEQ ID NO: 30118 - protein, 38 aa, Artificial Sequence
  Quasi-synthetic sequence derived from human genome
RPLAHLCRLRVRKAIGKYRIKLLDTLPLPGRLIRYLKY

SEQ ID NO: 30119 - protein, 38 aa, Artificial Sequence
  Quasi-synthetic sequence derived from human genome
RRRGFGLFFFLRLHRLLLLFLVLRGTLANKLNVPQVLL

SEQ ID NO: 30120 - protein, 38 aa, Artificial Sequence
  Quasi-synthetic sequence derived from human genome
SRIPLLRKRRFQLYRSTNPRARKNRSRIPLLRKHRFQL

SEQ ID NO: 30121 - protein, 38 aa, Artificial Sequence
  Quasi-synthetic sequence derived from human genome
TLPRRRGRPSRRFLGKKYRKYYYKSPKPLLRPFLCRIC

SEQ ID NO: 30122 - protein, 38 aa, Artificial Sequence
  Quasi-synthetic sequence derived from human genome
LDVIAFLLACVATVIFIITKFCLFCFRKLAKKGKKKKR

SEQ ID NO: 30123 - protein, 38 aa, Artificial Sequence
  Quasi-synthetic sequence derived from human genome
VTLIILAVVGGVIGLLILILLIKKLIIFILKKTREKKK

SEQ ID NO: 30124 - protein, 38 aa, Artificial Sequence
  Quasi-synthetic sequence derived from human genome
RRLRGLRRAAAGTSRLLFQRLLPCGVIKFRYIWICWFA

SEQ ID NO: 30125 - protein, 38 aa, Artificial Sequence
  Quasi-synthetic sequence derived from human genome
RGYQARCYAKFLRRTKAATIIQKYWRMYVVRRRYKIRR

SEQ ID NO: 30126 - protein, 38 aa, Artificial Sequence
  Quasi-synthetic sequence derived from human genome
PYKTMKFILWRRFRWAIILFIILFILLLFLAIFIYAFP

SEQ ID NO: 30127 - protein, 38 aa, Artificial Sequence
  Quasi-synthetic sequence derived from human genome
AQLALLGLGLLHALLLVLLLCRLRRLRARARARAAARL

SEQ ID NO: 30128 - protein, 38 aa, Artificial Sequence
  Quasi-synthetic sequence derived from human genome
RRRRAMRAFRMLLYSKSTSLTFHWKLWGRHRGRRRGLA

SEQ ID NO: 30129 - protein, 38 aa, Artificial Sequence
  Quasi-synthetic sequence derived from human genome
KLFMRMASKQLRENVLVKRKRTKGKKLLLSIGVLLHKW

SEQ ID NO: 30130 - protein, 38 aa, Artificial Sequence
  Quasi-synthetic sequence derived from human genome
KLLLPGLLLLLVVIILILAFWVLPKYKTRKAMRNNVPR

SEQ ID NO: 30131 - protein, 38 aa, Artificial Sequence
  Quasi-synthetic sequence derived from human genome
RGRPSRRFLGKKYRKYYYKSPKPLLRPFLCRICGSRFL

SEQ ID NO: 30132 - protein, 38 aa, Artificial Sequence
  Quasi-synthetic sequence derived from human genome
LSVLVILLVIYVSWKRYPASMKQLQQRSLMRRHRKKKR

SEQ ID NO: 30133 - protein, 38 aa, Artificial Sequence
  Quasi-synthetic sequence derived from human genome
AFSRSKKKKKKKKKRQCFAFLIYFRLGIKMGKQGIINK

SEQ ID NO: 30134 - protein, 38 aa, Artificial Sequence
  Quasi-synthetic sequence derived from human genome
VIKKIALREIRMLKQLKHPNLVNLLEVFRRKRRLHLVF

SEQ ID NO: 30135 - protein, 38 aa, Artificial Sequence
  Quasi-synthetic sequence derived from human genome
FLAFKNDISFWKKKKSMIGMSTKLWKVKKALKMTIFWR

SEQ ID NO: 30136 - protein, 38 aa, Artificial Sequence
  Quasi-synthetic sequence derived from human genome
WMRRMRILRRLLRRYRESKKIDRHMYHSLYLKVKGNVF

SEQ ID NO: 30137 - protein, 38 aa, Artificial Sequence
  Quasi-synthetic sequence derived from human genome
RKLHQQYRLARQRIIQFQARCRAYLVRKAFRHRLWAVL

SEQ ID NO: 30138 - protein, 38 aa, Artificial Sequence
  Quasi-synthetic sequence derived from human genome
LFCSFKIVWSLRRRQQLARQARMKKATRFIMVVAIVFI

SEQ ID NO: 30139 - protein, 38 aa, Artificial Sequence
  Quasi-synthetic sequence derived from human genome
SHIPLVRKRRFQLRRCMNPRARKNRSQIVLFQKRRFHF

SEQ ID NO: 30140 - protein, 38 aa, Artificial Sequence
  Quasi-synthetic sequence derived from human genome
RAMLYSRAVRNLKKKLLPWQRRGLLRAQGLRGWKARRA

SEQ ID NO: 30141 - protein, 38 aa, Artificial Sequence
  Quasi-synthetic sequence derived from human genome
FLLMQTHSFAIYHQSLFRILKVFKSLRALRAIRVLRRL

SEQ ID NO: 30142 - protein, 38 aa, Artificial Sequence
  Quasi-synthetic sequence derived from human genome
KFFLLKRFNKEKLGLLLLTFLGIVAAVLVKKYQAVLRR

SEQ ID NO: 30143 - protein, 38 aa, Artificial Sequence
  Quasi-synthetic sequence derived from human genome
RARRKTAKMLMVVLLVFALCYLPISVLNVLKRVFGMFR

SEQ ID NO: 30144 - protein, 38 aa, Artificial Sequence
  Quasi-synthetic sequence derived from human genome
LGLLVAGVLVLLVSLGVAIHLCCRRRRARLRFMKQLRL

SEQ ID NO: 30145 - protein, 38 aa, Artificial Sequence
  Quasi-synthetic sequence derived from human genome
YHILTRKRIRYRFRRFIQQFSQCKATARNLKLKYLINL

SEQ ID NO: 30146 - protein, 38 aa, Artificial Sequence
  Quasi-synthetic sequence derived from human genome
RFKKGKIVLLFSLLCWVLFNLGIGFVKPATLRCVPKIR

SEQ ID NO: 30147 - protein, 38 aa, Artificial Sequence
  Quasi-synthetic sequence derived from human genome
RCRGRKRCIKKFSIQRFPKILVLHLKRFSESRIRTSKL

SEQ ID NO: 30148 - protein, 38 aa, Artificial Sequence
  Quasi-synthetic sequence derived from human genome
LRPLVKPKIVKKRTKKFIRHQSDRYVKIKRNWRKPRGI

SEQ ID NO: 30149 - protein, 38 aa, Artificial Sequence
  Quasi-synthetic sequence derived from human genome
RGQILVICLIAVMVVFIILVIGVCTCCHPLRKRRKRKK

SEQ ID NO: 30150 - protein, 38 aa, Artificial Sequence
  Quasi-synthetic sequence derived from human genome
KRMRVKKLPMILALHLKRFKYMEQLHRYTKLSYRVVFP

SEQ ID NO: 30151 - protein, 38 aa, Artificial Sequence
  Quasi-synthetic sequence derived from human genome
KQKLLRHLVPAAALRRKRKALWAHLFSSLRGYLKSLPR

SEQ ID NO: 30152 - protein, 38 aa, Artificial Sequence
  Quasi-synthetic sequence derived from human genome
LWVRRKAGYKKKLWKKTPARKKRLREFVFCNKTQSKLL

SEQ ID NO: 30153 - protein, 38 aa, Artificial Sequence
  Quasi-synthetic sequence derived from human genome
WCRFRRAFVTVTHRLLLLCLGVVMVCVVLRYMKYRWTK

SEQ ID NO: 30154 - protein, 38 aa, Artificial Sequence
  Quasi-synthetic sequence derived from human genome
RPPGARTRAGAARVARWRRLRLQQLRRLRGLLRVLRGR

SEQ ID NO: 30155 - protein, 38 aa, Artificial Sequence
  Quasi-synthetic sequence derived from human genome
RRLQARRFRRSRRTGRLVVLIILTFAAFWLPYHVVNLA

SEQ ID NO: 30156 - protein, 38 aa, Artificial Sequence
  Quasi-synthetic sequence derived from human genome
KAPRPAARRKARRLLKTVLMILLAFLVCWGPLFGLLLA

SEQ ID NO: 30157 - protein, 38 aa, Artificial Sequence
  Quasi-synthetic sequence derived from human genome
IISAVVGILLVVVLGVVFGILIKRRQQKIRKYTMRRLL

SEQ ID NO: 30158 - protein, 38 aa, Artificial Sequence
  Quasi-synthetic sequence derived from human genome
RWLRIKLWISTVALALVPFLLLIPKFARWFSVPWKVIF

SEQ ID NO: 30159 - protein, 38 aa, Artificial Sequence
  Quasi-synthetic sequence derived from human genome
RVFRALKAISVVSRLKVIVGALLRSVKKLVNVIILTFF

SEQ ID NO: 30160 - protein, 38 aa, Artificial Sequence
  Quasi-synthetic sequence derived from human genome
KIAAFLPARQLWKWFGKPTQRRGMKGKARKLFYKAIVR

SEQ ID NO: 30161 - protein, 38 aa, Artificial Sequence
  Quasi-synthetic sequence derived from human genome
FRNLRLPKRLRVVYFLARTRLAQRLIMAGTVVWIGILV

SEQ ID NO: 30162 - protein, 38 aa, Artificial Sequence
  Quasi-synthetic sequence derived from human genome
RIKLSPLMMYEKLSMIRFRYRILRSQHFRTKSKVCKLR

SEQ ID NO: 30163 - protein, 38 aa, Artificial Sequence
  Quasi-synthetic sequence derived from human genome
WLKVFYCLRIANFNHPLFFLMKRKIIVLMPWLLRLSVL

SEQ ID NO: 30164 - protein, 38 aa, Artificial Sequence
  Quasi-synthetic sequence derived from human genome
LRGNTKINTFNWAKIRKLSFKRKHFLIKLHANILVLCK

SEQ ID NO: 30165 - protein, 38 aa, Artificial Sequence
  Quasi-synthetic sequence derived from human genome
HKRMKVKKLPMILALHLKRFKYMDQLHRYTKLSYRVVF

SEQ ID NO: 30166 - protein, 38 aa, Artificial Sequence
  Quasi-synthetic sequence derived from human genome
RLRRVAERVAARVQRRPWGAWLSARLWKWLKSPRSWRL

SEQ ID NO: 30167 - protein, 38 aa, Artificial Sequence
  Quasi-synthetic sequence derived from human genome
IPKAKQRLKRLRNIHYLFNTALFLIAWRLLIARSQMAR

SEQ ID NO: 30168 - protein, 38 aa, Artificial Sequence
  Quasi-synthetic sequence derived from human genome
LRFLKLRRERRALLCLLLVLGIAFIPIILEKIMYKVTR

SEQ ID NO: 30169 - protein, 38 aa, Artificial Sequence
  Quasi-synthetic sequence derived from human genome
KPLREWFVIVIMATICFILLILSLICKIKLGPVRRKLK

SEQ ID NO: 30170 - protein, 38 aa, Artificial Sequence
  Quasi-synthetic sequence derived from human genome
SFAILRIIRLVRVFRIFKLSRHSKGLQILGHTLRASMR

SEQ ID NO: 30171 - protein, 38 aa, Artificial Sequence
  Quasi-synthetic sequence derived from human genome
LLLWVKQRKDLLHLCCKKLKILGMPFRNIRSILKMVNL

SEQ ID NO: 30172 - protein, 38 aa, Artificial Sequence
  Quasi-synthetic sequence derived from human genome
VANTGILVFQGFTKINAFNWAKVRKLSFKRKRFLIKLR

SEQ ID NO: 30173 - protein, 38 aa, Artificial Sequence
  Quasi-synthetic sequence derived from human genome
RLPVKKIRKQMKLLLLLLLLSCAAWLTYVHLGLVRQGR

SEQ ID NO: 30174 - protein, 38 aa, Artificial Sequence
  Quasi-synthetic sequence derived from human genome
YIYFIHSLCLLGRLLIYKQGRKLFPIKLKNKKGLVSLI

SEQ ID NO: 30175 - protein, 38 aa, Artificial Sequence
  Quasi-synthetic sequence derived from human genome
SRVSVRTWWRWLTFWRRLQSAFLKNRSLRTKSSLWRRS

SEQ ID NO: 30176 - protein, 38 aa, Artificial Sequence
  Quasi-synthetic sequence derived from human genome
VIFVLVHSFLKKLLGKKLTRCLKPFENSRLRLWTKWVF

SEQ ID NO: 30177 - protein, 38 aa, Artificial Sequence
  Quasi-synthetic sequence derived from human genome
IRRKVSKIQRFHARSLWTNHKRYGYKKHSYRLVKKLKL

SEQ ID NO: 30178 - protein, 38 aa, Artificial Sequence
  Quasi-synthetic sequence derived from human genome
IIFFAFVLLLSGALAYCLALQLYVRRRKKLPSVLLFKK

SEQ ID NO: 30179 - protein, 38 aa, Artificial Sequence
  Quasi-synthetic sequence derived from human genome
RYLQRLLLVHGRWSYIRMCKFLRYFFYKNFAFTLVHFW

SEQ ID NO: 30180 - protein, 38 aa, Artificial Sequence
  Quasi-synthetic sequence derived from human genome
KRFKVMKPKVLRSWCRQILKGLLFLHTRTPPIIHRDLK

SEQ ID NO: 30181 - protein, 38 aa, Artificial Sequence
  Quasi-synthetic sequence derived from human genome
VSPKWKNFKGLKLLCRDKIRLNNAIWRAWYIQYVKRRK

SEQ ID NO: 30182 - protein, 38 aa, Artificial Sequence
  Quasi-synthetic sequence derived from human genome
IIRKYISKYSVFLRHRYQSRSAFLGRYLKKKKSVVSRL

SEQ ID NO: 30183 - protein, 38 aa, Artificial Sequence
  Quasi-synthetic sequence derived from human genome
RCYRLAVRTVIRAFVKCTKARYLKKKNMRTLWINRITA

SEQ ID NO: 30184 - protein, 38 aa, Artificial Sequence
  Quasi-synthetic sequence derived from human genome
AISVVKILRVLRVLRPLRAINRAKGLKHVVQCVFVAIR

SEQ ID NO: 30185 - protein, 38 aa, Artificial Sequence
  Quasi-synthetic sequence derived from human genome
AINVVKILRVLRVLRPLRAINRAKGLKHVVQCVFVAIR

SEQ ID NO: 30186 - protein, 38 aa, Artificial Sequence
  Quasi-synthetic sequence derived from human genome
ILKRALKVKQAMMQLYVLKLLKVQTKYLGRQWRKSNMK

SEQ ID NO: 30187 - protein, 38 aa, Artificial Sequence
  Quasi-synthetic sequence derived from human genome
YLRGFLARNRYRKILREHKAVIIQKRVRGWLARTHYKR

SEQ ID NO: 30188 - protein, 38 aa, Artificial Sequence
  Quasi-synthetic sequence derived from human genome
LRRRLKYFFMSPCDKFRAKGRKPCKLMLQVVKILVVTV

SEQ ID NO: 30189 - protein, 38 aa, Artificial Sequence
  Quasi-synthetic sequence derived from human genome
FLARRRYRKMLEEHKAVILQKYARAWLARRRFQSIRRF

SEQ ID NO: 30190 - protein, 38 aa, Artificial Sequence
  Quasi-synthetic sequence derived from human genome
TRRWRGLGSLFRRACCVALPLQLLLLLFLLLLFLLPIR

SEQ ID NO: 30191 - protein, 38 aa, Artificial Sequence
  Quasi-synthetic sequence derived from human genome
CIPVFRLARRRKKILFYCHFPDLLLTKRDSFLKRLYRA

SEQ ID NO: 30192 - protein, 38 aa, Artificial Sequence
  Quasi-synthetic sequence derived from human genome
LPTLKAAVIVAFAFTTLLIACLLLRVFRSGKRLKKTRK

SEQ ID NO: 30193 - protein, 38 aa, Artificial Sequence
  Quasi-synthetic sequence derived from human genome
RIRTKAAVKIQAWWRGTLVRRTLLHAALRAWIIQCWWR

SEQ ID NO: 30194 - protein, 38 aa, Artificial Sequence
  Quasi-synthetic sequence derived from human genome
MNLIILVNLIHLFIFRKSNFIFDKLHKVGIKTRRQWRR

SEQ ID NO: 30195 - protein, 38 aa, Artificial Sequence
  Quasi-synthetic sequence derived from human genome
KHFLRMLIQVCLYFYCKFLWRCLKFVMRKLTGRCELQR

SEQ ID NO: 30196 - protein, 38 aa, Artificial Sequence
  Quasi-synthetic sequence derived from human genome
RPGATGRRRRRLRRRPRGLRCSRLPPPPPLPLLLGLLL

SEQ ID NO: 30197 - protein, 38 aa, Artificial Sequence
  Quasi-synthetic sequence derived from human genome
KKYPQPKGQKKKKIVKYGMGGLIILFLIAIIWFPLLFM

SEQ ID NO: 30198 - protein, 38 aa, Artificial Sequence
  Quasi-synthetic sequence derived from human genome
AWWRGMLVRRTLLHAALRAWIIQCWWRQVLEKLLAKRR

SEQ ID NO: 30199 - protein, 38 aa, Artificial Sequence
  Quasi-synthetic sequence derived from human genome
RKYKKNLKALYVVHPTSFIKVLWNILKPLISHKFGKKV

SEQ ID NO: 30200 - protein, 38 aa, Artificial Sequence
  Quasi-synthetic sequence derived from human genome
KLKLFRHYYVLIVCYIYFTRIIAFLLKLAVPFQWKWLY

SEQ ID NO: 30201 - protein, 38 aa, Artificial Sequence
  Quasi-synthetic sequence derived from human genome
GNKKIWWIIRGPMMLCVTVNFFIFLKILKLLISKLKAH

SEQ ID NO: 30202 - protein, 38 aa, Artificial Sequence
  Quasi-synthetic sequence derived from human genome
RRPSPYWRLTWRVVSPLLLTIFVAYIILLFWKPLRYKA

SEQ ID NO: 30203 - protein, 38 aa, Artificial Sequence
  Quasi-synthetic sequence derived from human genome
FRPGKVLRFLRLFGPGKNVPSVWRSARRKRKKKHRELI

SEQ ID NO: 30204 - protein, 38 aa, Artificial Sequence
  Quasi-synthetic sequence derived from human genome
ERLKLFFIKNQRSSLRIRLFNFSLKLLTCLLYIVRVLL

SEQ ID NO: 30205 - protein, 38 aa, Artificial Sequence
  Quasi-synthetic sequence derived from human genome
KPSRPKTSFNWFVNPLKTFVFFIWRRYWRTLVLLLLVL

SEQ ID NO: 30206 - protein, 38 aa, Artificial Sequence
  Quasi-synthetic sequence derived from human genome
RVVKIAGISAGILVFILLLLVVILIVKKSKLAKKRKDA

SEQ ID NO: 30207 - protein, 38 aa, Artificial Sequence
  Quasi-synthetic sequence derived from human genome
LQRAGVTLRVLRMMRIFWVIKLARHFIGLQTLGLTLKR

SEQ ID NO: 30208 - protein, 38 aa, Artificial Sequence
  Quasi-synthetic sequence derived from human genome
AARDVLGFLRVVRFVRILRIFKLTRHFVGLRVLGHTLR

SEQ ID NO: 30209 - protein, 38 aa, Artificial Sequence
  Quasi-synthetic sequence derived from human genome
YLGLARKKSGILLLTLVSFLIFILFIIVQLFIMKLRKA

SEQ ID NO: 30210 - protein, 38 aa, Artificial Sequence
  Quasi-synthetic sequence derived from human genome
KQNIFHFLYGKNRSRIPLLRKRWFQLGRSMNPRARKKR

SEQ ID NO: 30211 - protein, 38 aa, Artificial Sequence
  Quasi-synthetic sequence derived from human genome
SLAILRIIRLVRVFRIFKLSRHSKGLQILGQTLKASMR

SEQ ID NO: 30212 - protein, 38 aa, Artificial Sequence
  Quasi-synthetic sequence derived from human genome
RQWLAIQKLRSKIHKKVDRKASKGRKLRFHVLSKLLSF

SEQ ID NO: 30213 - protein, 38 aa, Artificial Sequence
  Quasi-synthetic sequence derived from human genome
VRVILAPWKKGLIAVVIIGVIIALLIIAAKCYFLRKAK

SEQ ID NO: 30214 - protein, 38 aa, Artificial Sequence
  Quasi-synthetic sequence derived from human genome
FPPLYYRRAHRRFVTKKALCIRVFQETQKLKKRRRALK

SEQ ID NO: 30215 - protein, 38 aa, Artificial Sequence
  Quasi-synthetic sequence derived from human genome
VPLSVLILGLLIMFITIVFCAAGIVVLVLHRRRRYKKK

SEQ ID NO: 30216 - protein, 38 aa, Artificial Sequence
  Quasi-synthetic sequence derived from human genome
LLLLLVVCGIGCVWHWKHRVATRFTLPRFLQRRSSRRK

SEQ ID NO: 30217 - protein, 38 aa, Artificial Sequence
  Quasi-synthetic sequence derived from human genome
KLKEVTLFVKRLRRKTYLSNMAKTMRMVLKSKRRVSVL

SEQ ID NO: 30218 - protein, 38 aa, Artificial Sequence
  Quasi-synthetic sequence derived from human genome
KMLRLRLPNLKMVRLRVSFSAVVFKAVSDICKILNIRR

SEQ ID NO: 30219 - protein, 38 aa, Artificial Sequence
  Quasi-synthetic sequence derived from human genome
FLFAFFIFIMSLLLISGQRPVNLTMRRKLRKHNCLQRR

SEQ ID NO: 30220 - protein, 38 aa, Artificial Sequence
  Quasi-synthetic sequence derived from human genome
LNRFLLLFIGFVCVLLSFFMARVFMRMKLPRSLALLPR

SEQ ID NO: 30221 - protein, 38 aa, Artificial Sequence
  Quasi-synthetic sequence derived from human genome
AAKDVLGFLRVVRFVRILRIFKLTRHFVGLRVLGHTLR

SEQ ID NO: 30222 - protein, 38 aa, Artificial Sequence
  Quasi-synthetic sequence derived from human genome
AKDVLGFLRVVRFVRILRIFKLTRHFVGLRVLGHTLRA

SEQ ID NO: 30223 - protein, 38 aa, Artificial Sequence
  Quasi-synthetic sequence derived from human genome
IVKQGYVKIRSRKLGIFRRCWLVFKKASSKGPRRLEKF

SEQ ID NO: 30224 - protein, 38 aa, Artificial Sequence
  Quasi-synthetic sequence derived from human genome
LYGFIFYLLASVLLSLLLILKAGRRWNKYFKSRRPLFT

SEQ ID NO: 30225 - protein, 38 aa, Artificial Sequence
  Quasi-synthetic sequence derived from human genome
LLVPLLVLALASYRRLCLRLRLADCLVPYSRALYRRRR

SEQ ID NO: 30226 - protein, 38 aa, Artificial Sequence
  Quasi-synthetic sequence derived from human genome
CRLSRALLTAVTNVLIFFWCLAFLWGLLILLKYRWRKL

SEQ ID NO: 30227 - protein, 38 aa, Artificial Sequence
  Quasi-synthetic sequence derived from human genome
LVALLAVIVLVALLLLWRRRQKRRTGALVLSRGGKRNG

SEQ ID NO: 30228 - protein, 38 aa, Artificial Sequence
  Quasi-synthetic sequence derived from human genome
FRQPLSSLWRSLVPLFCWLRATFWLLATKRRKQQLVLR

SEQ ID NO: 30229 - protein, 38 aa, Artificial Sequence
  Quasi-synthetic sequence derived from human genome
LLRLLGLRRGLRRLRRLWAGPRVQRGRGRGRGRGWGPS

SEQ ID NO: 30230 - protein, 38 aa, Artificial Sequence
  Quasi-synthetic sequence derived from human genome
RLTRWRTRYKTIRINLGLWAASFILALPVWVYSKVIKF

SEQ ID NO: 30231 - protein, 38 aa, Artificial Sequence
  Quasi-synthetic sequence derived from human genome
KRLPVKRAAVQFLNNAWGIQKKQNAKRFKRRWMVRKMK

SEQ ID NO: 30232 - protein, 38 aa, Artificial Sequence
  Quasi-synthetic sequence derived from human genome
FINLSFLRLFRAARLIKLLRQGYTIRILLWTFVQSFKA

SEQ ID NO: 30233 - protein, 38 aa, Artificial Sequence
  Quasi-synthetic sequence derived from human genome
RFSCTQIWVKMYGYFAGLCRRLQKFWRVTVKGFFVKKK

SEQ ID NO: 30234 - protein, 38 aa, Artificial Sequence
  Quasi-synthetic sequence derived from human genome
RRSLRPCSVLVSLLQKPRHRCRKRKPLLAIGFYLYRMN

SEQ ID NO: 30235 - protein, 38 aa, Artificial Sequence
  Quasi-synthetic sequence derived from human genome
FLLCAIAMFLVIFPMFTFPKKLPPRHKKKKKKKFSVDA

SEQ ID NO: 30236 - protein, 38 aa, Artificial Sequence
  Quasi-synthetic sequence derived from human genome
WLLLVLVLVLLVSPRGCRARRGLRGLLMAHSQRLLFRI

SEQ ID NO: 30237 - protein, 38 aa, Artificial Sequence
  Quasi-synthetic sequence derived from human genome
GRKAPLWLRAKFQRLLFKLGCYIQKNCGKFLVVGLLIF

SEQ ID NO: 30238 - protein, 38 aa, Artificial Sequence
  Quasi-synthetic sequence derived from human genome
WLRRGVLLVRAPPACLQVLRDAWRRRALRPPRGFRIRA

SEQ ID NO: 30239 - protein, 38 aa, Artificial Sequence
  Quasi-synthetic sequence derived from human genome
YQLLTLALLTVNALLVLLALAAWASRWLRRKLRARRKG

SEQ ID NO: 30240 - protein, 38 aa, Artificial Sequence
  Quasi-synthetic sequence derived from human genome
YLIPFLIIVGICLILIVIFMITKFVQDRHRARRNRLRK

SEQ ID NO: 30241 - protein, 38 aa, Artificial Sequence
  Quasi-synthetic sequence derived from human genome
VRGYLARRRIRLWHRGAMVIQATWRGYRVRRNLAHLCR

SEQ ID NO: 30242 - protein, 38 aa, Artificial Sequence
  Quasi-synthetic sequence derived from human genome
RWARPFYLAFVFCLALGLLQAIKLYLRRQRLLRDLRPF

SEQ ID NO: 30243 - protein, 38 aa, Artificial Sequence
  Quasi-synthetic sequence derived from human genome
VVKKIALREIRMLKQLKHPNLVNLIEVFRRKRKMHLVF

SEQ ID NO: 30244 - protein, 38 aa, Artificial Sequence
  Quasi-synthetic sequence derived from human genome
MWRRYRAKKYLCKVKAACKIQAWYRCWRAHKEYLAILK

SEQ ID NO: 30245 - protein, 38 aa, Artificial Sequence
  Quasi-synthetic sequence derived from human genome
RLQQGNMRKNVRVLSRTSKFRRLRQLLRRRKKRWQGRR

SEQ ID NO: 30246 - protein, 38 aa, Artificial Sequence
  Quasi-synthetic sequence derived from human genome
ILSSIFGLLLLVLFILFLTWCRVQKQKHLPLRVSTRRR

SEQ ID NO: 30247 - protein, 38 aa, Artificial Sequence
  Quasi-synthetic sequence derived from human genome
HFVPQMPFVPAVAKSIPRKRISLKRPKKCFRNLFHIRR

SEQ ID NO: 30248 - protein, 38 aa, Artificial Sequence
  Quasi-synthetic sequence derived from human genome
RARGYLARQRYQQMRRSLVKFRSLVHAYVSRRRYLKLR

SEQ ID NO: 30249 - protein, 38 aa, Artificial Sequence
  Quasi-synthetic sequence derived from human genome
KVRHTKKKTFKCIKCSKSFFMLSCLIRHKRIHIRQNIY

SEQ ID NO: 30250 - protein, 38 aa, Artificial Sequence
  Quasi-synthetic sequence derived from human genome
FGSKEQKLLKRLRLLPALLILRAFKPHRKIRDYRVVVV

SEQ ID NO: 30251 - protein, 38 aa, Artificial Sequence
  Quasi-synthetic sequence derived from human genome
IKTIKSLRVLRVLRPLKTIKRLPKLKAVFDCVVTSLKN

SEQ ID NO: 30252 - protein, 38 aa, Artificial Sequence
  Quasi-synthetic sequence derived from human genome
ALFLILLATAVILGSAVLLFHFCIFHRRKMKAIRRSLK

SEQ ID NO: 30253 - protein, 38 aa, Artificial Sequence
  Quasi-synthetic sequence derived from human genome
RRKLKFFFMNPCEKFWARGRKPWKLAIQILKIAMVTIQ

SEQ ID NO: 30254 - protein, 38 aa, Artificial Sequence
  Quasi-synthetic sequence derived from human genome
LRRNKAALLFWHILLLGPIVRCLHTIRNYHKWLKNLKQ

SEQ ID NO: 30255 - protein, 38 aa, Artificial Sequence
  Quasi-synthetic sequence derived from human genome
RPKGYRKLLALGTWLLALLLTLPVMLAMRLVRRGPKSL

SEQ ID NO: 30256 - protein, 38 aa, Artificial Sequence
  Quasi-synthetic sequence derived from human genome
KILWKVPSFLITQVRRMNEATMLLKKQLPSVRKLLRRK

SEQ ID NO: 30257 - protein, 38 aa, Artificial Sequence
  Quasi-synthetic sequence derived from human genome
KTLLRCPSKKKYKAIRLIFVIMAVFFIFWTPYNVAILL

SEQ ID NO: 30258 - protein, 38 aa, Artificial Sequence
  Quasi-synthetic sequence derived from human genome
FGRIIWHKFKQWVIPWHLNKRYNRKRFFALPYVDHFLR

SEQ ID NO: 30259 - protein, 38 aa, Artificial Sequence
  Quasi-synthetic sequence derived from human genome
RRQRKLHFVVGGFAYLLPKTAVVLRCPARRVRKPLITW

SEQ ID NO: 30260 - protein, 38 aa, Artificial Sequence
  Quasi-synthetic sequence derived from human genome
AIRIRILCCLTFLVKVKSKALLKNRLLPPLLHTLFPIV

SEQ ID NO: 30261 - protein, 38 aa, Artificial Sequence
  Quasi-synthetic sequence derived from human genome
PVKVRVSYQKLLKYYVLNALKHRPPKAQKKRYLFRSFK

SEQ ID NO: 30262 - protein, 38 aa, Artificial Sequence
  Quasi-synthetic sequence derived from human genome
HIKNYIINKDILRRVLVLMASKHAFLALCALRFKRKII

SEQ ID NO: 30263 - protein, 38 aa, Artificial Sequence
  Quasi-synthetic sequence derived from human genome
SLAILRVIRLVRVFRIFKLSRHSKGLQILGKTLQASMR

SEQ ID NO: 30264 - protein, 38 aa, Artificial Sequence
  Quasi-synthetic sequence derived from human genome
YVRTRGVGKVPRKKVNVKVFIIIAVFFICFVPFHFARI

SEQ ID NO: 30265 - protein, 38 aa, Artificial Sequence
  Quasi-synthetic sequence derived from human genome
TYLKRFKVMKPKVLRSWCRQILKGLQFLHTRTPPIIHR

SEQ ID NO: 30266 - protein, 38 aa, Artificial Sequence
  Quasi-synthetic sequence derived from human genome
QAWWRGTLVRRALLHAALSACIIQCWWRLILSKILKKR

SEQ ID NO: 30267 - protein, 38 aa, Artificial Sequence
  Quasi-synthetic sequence derived from human genome
MPGRLLRGLWQRWRRYKYRFVPWIALNLSHNPRTLRYV

SEQ ID NO: 30268 - protein, 38 aa, Artificial Sequence
  Quasi-synthetic sequence derived from human genome
ALFCLQYLGVRVLLRFQRKLSVLLLLLGRRRVDFRLVN

SEQ ID NO: 30269 - protein, 38 aa, Artificial Sequence
  Quasi-synthetic sequence derived from human genome
LFFLLSLGIILFCYVEILRTLFRSRSKRRHRTVKLIFA

SEQ ID NO: 30270 - protein, 38 aa, Artificial Sequence
  Quasi-synthetic sequence derived from human genome
LHVVLSSKVCRGYLVKMGGKIKSWKKRWFVFDRLKRTL

SEQ ID NO: 30271 - protein, 38 aa, Artificial Sequence
  Quasi-synthetic sequence derived from human genome
RQIQLLLWKNWTLRKRQKIRFVVELVWPLSLFLVLIWL

SEQ ID NO: 30272 - protein, 38 aa, Artificial Sequence
  Quasi-synthetic sequence derived from human genome
NIPLFRRFGRQRKIGGRGRIISPYRTPVLRRHRYSIFR

SEQ ID NO: 30273 - protein, 38 aa, Artificial Sequence
  Quasi-synthetic sequence derived from human genome
TLVLIVLVTLIFCLIVLSLSTFHIHKRRMKKRKMQRAQ

SEQ ID NO: 30274 - protein, 38 aa, Artificial Sequence
  Quasi-synthetic sequence derived from human genome
RRKMPSLGWLRKCYQQIDRRLRKNLKSLIIVHPSWFIR

SEQ ID NO: 30275 - protein, 38 aa, Artificial Sequence
  Quasi-synthetic sequence derived from human genome
LKRSIKLLSLIKWKGSKSSKLNSKFWKHLVYEMPIKKK

SEQ ID NO: 30276 - protein, 38 aa, Artificial Sequence
  Quasi-synthetic sequence derived from human genome
FILYFKPSVFRCIALRWVRLLGFAIVYGTIILKLYRVL

SEQ ID NO: 30277 - protein, 38 aa, Artificial Sequence
  Quasi-synthetic sequence derived from human genome
IKHLRKSLKIIYLNSIQQLEIRNMSWPRLIRKLRCYLK

SEQ ID NO: 30278 - protein, 38 aa, Artificial Sequence
  Quasi-synthetic sequence derived from human genome
PVFPRFIKIIEVKNKKLVELLRRKVRLAQPYVGVFLKR

SEQ ID NO: 30279 - protein, 38 aa, Artificial Sequence
  Quasi-synthetic sequence derived from human genome
WRRWNRFCRRKCRAAVKSNVFYWLVIFLVFLNTLTIAS

SEQ ID NO: 30280 - protein, 38 aa, Artificial Sequence
  Quasi-synthetic sequence derived from human genome
RPIGKAKPKKQSKKKVPFWNVQNKIILFTVFLFILAVI

SEQ ID NO: 30281 - protein, 38 aa, Artificial Sequence
  Quasi-synthetic sequence derived from human genome
KYKKNLKALYVVHPTSFIKVLWNILKPLISHKFGKKVI

SEQ ID NO: 30282 - protein, 38 aa, Artificial Sequence
  Quasi-synthetic sequence derived from human genome
RRRRSRSVVRRRSFSISPVRLRRSRTPLRRRFSRSPIR

SEQ ID NO: 30283 - protein, 38 aa, Artificial Sequence
  Quasi-synthetic sequence derived from human genome
LRVLRVLRPLKTIKRLPKLKAVFDCVVNSLKNVFNILI

SEQ ID NO: 30284 - protein, 38 aa, Artificial Sequence
  Quasi-synthetic sequence derived from human genome
FLWFTNPCKTMKFIVWRRFKWVIIGLLFLLILLLFVAV

SEQ ID NO: 30285 - protein, 38 aa, Artificial Sequence
  Quasi-synthetic sequence derived from human genome
IYNSISYKTFLPKCIRAKIQDYHILTRKRIRYRFRRFI

SEQ ID NO: 30286 - protein, 38 aa, Artificial Sequence
  Quasi-synthetic sequence derived from human genome
RQRRQKLLLAQLHHRKRVKAAGQIQAWWRGVLVRRTLL

SEQ ID NO: 30287 - protein, 38 aa, Artificial Sequence
  Quasi-synthetic sequence derived from human genome
MLRSVWNFLKRHKKKCIFLGTVLGGVYILGKYGQKKIR

SEQ ID NO: 30288 - protein, 38 aa, Artificial Sequence
  Quasi-synthetic sequence derived from human genome
WLAIILLIFISLFPEILLIVLKNVRRRSARRNLSCRRA

SEQ ID NO: 30289 - protein, 38 aa, Artificial Sequence
  Quasi-synthetic sequence derived from human genome
LIQAYWKGFQTRKRLKKLPSAVIALQRSFRSKRSKMLL

SEQ ID NO: 30290 - protein, 38 aa, Artificial Sequence
  Quasi-synthetic sequence derived from human genome
ILLVVRRLRVPKTPAPDGPRYRFRKRDKVLFYGRKIMR

SEQ ID NO: 30291 - protein, 38 aa, Artificial Sequence
  Quasi-synthetic sequence derived from human genome
MRRIRYEFKAKNIKKKKVSIMVSVDGVKVILKKKKKKK

SEQ ID NO: 30292 - protein, 38 aa, Artificial Sequence
  Quasi-synthetic sequence derived from human genome
RYLRVKLTVRYKRVTTHRRIWLALGLCWLVSFLVGLTP

SEQ ID NO: 30293 - protein, 38 aa, Artificial Sequence
  Quasi-synthetic sequence derived from human genome
LKVIGKGSFGKVLLAKRKLDGKFYAVKVLQKKIVLNRK

SEQ ID NO: 30294 - protein, 38 aa, Artificial Sequence
  Quasi-synthetic sequence derived from human genome
KPFFRLQKFLRRTQFLLFFLTAAYLMTGSLLLLQRVRV

SEQ ID NO: 30295 - protein, 38 aa, Artificial Sequence
  Quasi-synthetic sequence derived from human genome
TRLPIRMAKALGKRTAKYRWFAVLYLLVCFLLLPSLVF

SEQ ID NO: 30296 - protein, 38 aa, Artificial Sequence
  Quasi-synthetic sequence derived from human genome
VWYTPPTFMIAVFLPIVVLIFKSILFLPCLRKKILKIR

SEQ ID NO: 30297 - protein, 38 aa, Artificial Sequence
  Quasi-synthetic sequence derived from human genome
KWQVKRKFKHFQEFHRELLKYKAFIRIPIPTRRHTFRR

SEQ ID NO: 30298 - protein, 38 aa, Artificial Sequence
  Quasi-synthetic sequence derived from human genome
LKKKLFKRRRVLNRERRLRHRVVGAVIDQGLITRHHLK

SEQ ID NO: 30299 - protein, 38 aa, Artificial Sequence
  Quasi-synthetic sequence derived from human genome
ALTRSFYVILGFCGLTALYFLIRAFRLKKPQRRRYGLL

SEQ ID NO: 30300 - protein, 38 aa, Artificial Sequence
  Quasi-synthetic sequence derived from human genome
AIIIQKHCKAFKIRKHYLHLRATVVSIQRRYRKLTAVR

SEQ ID NO: 30301 - protein, 38 aa, Artificial Sequence
  Quasi-synthetic sequence derived from human genome
WRNLFSCINLLRLLNKLTKWKHSRTMMLVVFKSAPILK

SEQ ID NO: 30302 - protein, 38 aa, Artificial Sequence
  Quasi-synthetic sequence derived from human genome
VFKLGLAKSIHHARVLIRQRHIRVRKQVVNIPSFIVRL

SEQ ID NO: 30303 - protein, 38 aa, Artificial Sequence
  Quasi-synthetic sequence derived from human genome
VQMRLKKHRWYKKILKSRDPIIFSVGWRRFQTIPLYYI

SEQ ID NO: 30304 - protein, 38 aa, Artificial Sequence
  Quasi-synthetic sequence derived from human genome
KIIRPLRNIFLKKPVFAKTVSIFIWFFLFFISLPNTIL

SEQ ID NO: 30305 - protein, 38 aa, Artificial Sequence
  Quasi-synthetic sequence derived from human genome
SIISAVVGILLVVVLGVVFGILIKRRQQKIRKYTMRRL

SEQ ID NO: 30306 - protein, 38 aa, Artificial Sequence
  Quasi-synthetic sequence derived from human genome
LYFLFICPFVLLLLLLISLLCLYWKARKLSTLRSNTRK

SEQ ID NO: 30307 - protein, 38 aa, Artificial Sequence
  Quasi-synthetic sequence derived from human genome
KSKIKSKYASYLSFIKILLKRGGVKVSTKNLIKLFQII

SEQ ID NO: 30308 - protein, 38 aa, Artificial Sequence
  Quasi-synthetic sequence derived from human genome
KRAIRIILSFFFLFLLYFLAFLIASFGNFLPKTKMAKM

SEQ ID NO: 30309 - protein, 38 aa, Artificial Sequence
  Quasi-synthetic sequence derived from human genome
RPKRREIPLKVLVKAVLFACMLMRKTMASRVRVTILFA

SEQ ID NO: 30310 - protein, 38 aa, Artificial Sequence
  Quasi-synthetic sequence derived from human genome
WRCRRLRAIYTIMRWFRRHKVRAHLAELQRRFQAARQP

SEQ ID NO: 30311 - protein, 38 aa, Artificial Sequence
  Quasi-synthetic sequence derived from human genome
RILFLKPSCMLEVITWPIQAFVKRKVIIFLKKCLLCKV

SEQ ID NO: 30312 - protein, 38 aa, Artificial Sequence
  Quasi-synthetic sequence derived from human genome
FKKTVNIPVLKVRKEIVSKLMRSLKRAALQRPGIRRVI

SEQ ID NO: 30313 - protein, 38 aa, Artificial Sequence
  Quasi-synthetic sequence derived from human genome
RRLRKNLKSFIIVHPSWFIRTILAVTRPFISSKFSSKI

SEQ ID NO: 30314 - protein, 38 aa, Artificial Sequence
  Quasi-synthetic sequence derived from human genome
KYHRFLGRHFPRFYVLYTIFMKGLQMLWADAKKARRIK

SEQ ID NO: 30315 - protein, 38 aa, Artificial Sequence
  Quasi-synthetic sequence derived from human genome
FLFLLSATFNASFLLKLQKWTQKKEKGKKLSRMKLLLK

SEQ ID NO: 30316 - protein, 38 aa, Artificial Sequence
  Quasi-synthetic sequence derived from human genome
WRNLFSCINLLRILNKLTKWKHSRTMMLVVFKSAPILK

SEQ ID NO: 30317 - protein, 38 aa, Artificial Sequence
  Quasi-synthetic sequence derived from human genome
PVAKKLFVVTAVSAISVIFLAHHFKRKRGKKKGKILPW

SEQ ID NO: 30318 - protein, 38 aa, Artificial Sequence
  Quasi-synthetic sequence derived from human genome
KVGQVLRVMRLMRIFRILKLARHSTGLRAFGFTLRQCY

SEQ ID NO: 30319 - protein, 38 aa, Artificial Sequence
  Quasi-synthetic sequence derived from human genome
LLLGKGCRYFRYILKQDHQILGKKIKRMKRSVKKYSIV

SEQ ID NO: 30320 - protein, 38 aa, Artificial Sequence
  Quasi-synthetic sequence derived from human genome
PRLDAEVYKTARALRIVRFTKILSLLRLLRLSRLIRYI

SEQ ID NO: 30321 - protein, 38 aa, Artificial Sequence
  Quasi-synthetic sequence derived from human genome
HIPWITAVLPTVIICVMVFCLILWKWKKKKRPRNSYKC

SEQ ID NO: 30322 - protein, 38 aa, Artificial Sequence
  Quasi-synthetic sequence derived from human genome
KQNIFHFLYGKNRSRIPLLRKRRFQLYRSMNPRARKNR

SEQ ID NO: 30323 - protein, 38 aa, Artificial Sequence
  Quasi-synthetic sequence derived from human genome
KLYACKKLNKKRLKKRKGYQGAMVEKKILMKVHSRFIV

SEQ ID NO: 30324 - protein, 38 aa, Artificial Sequence
  Quasi-synthetic sequence derived from human genome
KRVRGWLARTHYKRSMHAIIYLQCCFRRMMAKRELKKL

SEQ ID NO: 30325 - protein, 38 aa, Artificial Sequence
  Quasi-synthetic sequence derived from human genome
RVRFLNLKKTIIKFQAHVRKHQQRQKYKKMKKAAVIIQ

SEQ ID NO: 30326 - protein, 38 aa, Artificial Sequence
  Quasi-synthetic sequence derived from human genome
KVFIKYTKLKKIFLQHNCIRHISRKAFFGLCNLQILYL

SEQ ID NO: 30327 - protein, 38 aa, Artificial Sequence
  Quasi-synthetic sequence derived from human genome
HRVRVLSVARPGLWLYTHPLIKLLFLPRRSRCKFFSLT

SEQ ID NO: 30328 - protein, 38 aa, Artificial Sequence
  Quasi-synthetic sequence derived from human genome
RIKTSIFSLFRAPKLRMRVFGLCFVRFAITVPFYGLIL

SEQ ID NO: 30329 - protein, 38 aa, Artificial Sequence
  Quasi-synthetic sequence derived from human genome
LHLVLRLRGGAKKRKKKSYTTPKKNKHKRKKVKLAVLK

SEQ ID NO: 30330 - protein, 38 aa, Artificial Sequence
  Quasi-synthetic sequence derived from human genome
LRLKAFILFGKLARVVGMSKKHFFKGEVKKAWIPLMLH

SEQ ID NO: 30331 - protein, 38 aa, Artificial Sequence
  Quasi-synthetic sequence derived from human genome
LLLWKNVTLKRRSPWVLAFEIFIPLVLFFILLGLRQKK

SEQ ID NO: 30332 - protein, 38 aa, Artificial Sequence
  Quasi-synthetic sequence derived from human genome
RRPRPRRELSLGRKKAPHRLCGRFSRISMKLPRIPLRR

SEQ ID NO: 30333 - protein, 38 aa, Artificial Sequence
  Quasi-synthetic sequence derived from human genome
LRKRRFQLCRCMNPRARKNRSQIVLFQKLRFQFFCSMS

SEQ ID NO: 30334 - protein, 38 aa, Artificial Sequence
  Quasi-synthetic sequence derived from human genome
KYLKVFYKFLNSNRHTIRHTGKKCFKCKKCVKSFCIRL

SEQ ID NO: 30335 - protein, 38 aa, Artificial Sequence
  Quasi-synthetic sequence derived from human genome
RLVVYKIVYMFLFLLCLTLFQVYYSLWRKLLKAFWWLV

SEQ ID NO: 30336 - protein, 38 aa, Artificial Sequence
  Quasi-synthetic sequence derived from human genome
AWLRRRYLRLRYEDLVRQPRAQLRRLLRFSGLRALAAL

SEQ ID NO: 30337 - protein, 38 aa, Artificial Sequence
  Quasi-synthetic sequence derived from human genome
FRIKRFLAKKQKQNRPIPQWIRMKTGNKIRYNSKRRHW

SEQ ID NO: 30338 - protein, 38 aa, Artificial Sequence
  Quasi-synthetic sequence derived from human genome
RLRKILFCVLGLYIAIPFLIKLCPGIQAKLIFLNFVRV

SEQ ID NO: 30339 - protein, 38 aa, Artificial Sequence
  Quasi-synthetic sequence derived from human genome
SVIIALRRAVKRHRERRERQKRVFRMSLLIISTFLLCW

SEQ ID NO: 30340 - protein, 38 aa, Artificial Sequence
  Quasi-synthetic sequence derived from human genome
KKRVKLAQGLWLMNWFSVLAGIIIFSLGLFLKIELRKR

SEQ ID NO: 30341 - protein, 38 aa, Artificial Sequence
  Quasi-synthetic sequence derived from human genome
RHAKIKRAITFIMVVAIVFVICFLPSVVVRIRIFWLLH

SEQ ID NO: 30342 - protein, 38 aa, Artificial Sequence
  Quasi-synthetic sequence derived from human genome
RMYQKDPVKAKTKRRLVLGLREVLKHLKLKKLKCVIIS

SEQ ID NO: 30343 - protein, 38 aa, Artificial Sequence
  Quasi-synthetic sequence derived from human genome
LWLVLRYRHKRLSYQSVFLFLCLFWASLRTVLFSFYFK

SEQ ID NO: 30344 - protein, 38 aa, Artificial Sequence
  Quasi-synthetic sequence derived from human genome
FFIFLKILKLLISKLKAHQMCFRDYKYRLAKSTLVLIP

SEQ ID NO: 30345 - protein, 38 aa, Artificial Sequence
  Quasi-synthetic sequence derived from human genome
YLLIIRSLRQGLRVEKRLKTKAVRMIAIVLAIFLVCFV

SEQ ID NO: 30346 - protein, 38 aa, Artificial Sequence
  Quasi-synthetic sequence derived from human genome
VHRILINLMKYLQKWKRYRPLWKLDKAIVMEKFAAKKP

SEQ ID NO: 30347 - protein, 38 aa, Artificial Sequence
  Quasi-synthetic sequence derived from human genome
RMRGFQARKRYLRRRAALGQLNTILLVAQPLLQRRQRL

SEQ ID NO: 30348 - protein, 38 aa, Artificial Sequence
  Quasi-synthetic sequence derived from human genome
LQRVLLLFRAAQCSFPVAQWYILQLRWARKVMQKIRMK

SEQ ID NO: 30349 - protein, 38 aa, Artificial Sequence
  Quasi-synthetic sequence derived from human genome
LKIKLAVRMDKPQNMKHSGYLWAIGKNVWKRWKKRFFV

SEQ ID NO: 30350 - protein, 38 aa, Artificial Sequence
  Quasi-synthetic sequence derived from human genome
KQNIFHFLYRKNRSRIPLLRKRWFQLGHSMNPRARKNR

SEQ ID NO: 30351 - protein, 38 aa, Artificial Sequence
  Quasi-synthetic sequence derived from human genome
IAGLLMFIIILLGVMLTIKRRRNAYSYSYYLKLAKKQK

SEQ ID NO: 30352 - protein, 38 aa, Artificial Sequence
  Quasi-synthetic sequence derived from human genome
WRFIRVFIKTIRRDIFGGLVLLKVKAKVRQCLQERRTV

SEQ ID NO: 30353 - protein, 38 aa, Artificial Sequence
  Quasi-synthetic sequence derived from human genome
LRLCFLVMAYGTTIFHPLLYAFTRQKFQKVLKSKMKKR

SEQ ID NO: 30354 - protein, 38 aa, Artificial Sequence
  Quasi-synthetic sequence derived from human genome
LERAGLVLRLLRALRVLYVMRLARHSLGLRSLGLTMRR

SEQ ID NO: 30355 - protein, 38 aa, Artificial Sequence
  Quasi-synthetic sequence derived from human genome
LFLSVAMILLVIYVSWKRYPASMKQLQQHSLMKRRRKK

SEQ ID NO: 30356 - protein, 38 aa, Artificial Sequence
  Quasi-synthetic sequence derived from human genome
CRAYLVRKAFRHRLWAVLTVQAYARGMIARRLHQRLRA

SEQ ID NO: 30357 - protein, 38 aa, Artificial Sequence
  Quasi-synthetic sequence derived from human genome
KLSRALRYYYNKRILHKTKGKRFTYKFNFNKLVLVNYP

SEQ ID NO: 30358 - protein, 38 aa, Artificial Sequence
  Quasi-synthetic sequence derived from human genome
AKKTSFKDCIPRSFRRHIRQHSALTRLRLRNVFRRFLR

SEQ ID NO: 30359 - protein, 38 aa, Artificial Sequence
  Quasi-synthetic sequence derived from human genome
KLWFKFQRYFRRKPVRFFTFLALYLTAGSLVFLHSGFV

SEQ ID NO: 30360 - protein, 38 aa, Artificial Sequence
  Quasi-synthetic sequence derived from human genome
RWLLRTKRLHWSRLLFLLGMLIIGSTYQHLRRPRGLSS

SEQ ID NO: 30361 - protein, 38 aa, Artificial Sequence
  Quasi-synthetic sequence derived from human genome
IKRKAPRGFLKRVFKRKKPQLRLEKSGDLLVHLNCLLF

SEQ ID NO: 30362 - protein, 38 aa, Artificial Sequence
  Quasi-synthetic sequence derived from human genome
FKTCKEYLRPLKKFLRKLHLPRDLPQKKKLKYMKQSLV

SEQ ID NO: 30363 - protein, 38 aa, Artificial Sequence
  Quasi-synthetic sequence derived from human genome
LIIGLRKTFWFFFQRHKLKGTSFLLGGVVIVLLRWPLL

SEQ ID NO: 30364 - protein, 38 aa, Artificial Sequence
  Quasi-synthetic sequence derived from human genome
PSIATGMVGALLLLLVVALGIGLFMRRRHIVRKRTLRR

SEQ ID NO: 30365 - protein, 38 aa, Artificial Sequence
  Quasi-synthetic sequence derived from human genome
VIRFPGRRGYGRLRPRARSLSKASTAINWLTKKFLLKK

SEQ ID NO: 30366 - protein, 38 aa, Artificial Sequence
  Quasi-synthetic sequence derived from human genome
PLFALLSRGRRRRMHVLRRRWDLGSLCRALLTRGLAAL

SEQ ID NO: 30367 - protein, 38 aa, Artificial Sequence
  Quasi-synthetic sequence derived from human genome
RRAVKILKKKKLRRIPNGEANVKKEIQLLRRLRHKNVI

SEQ ID NO: 30368 - protein, 38 aa, Artificial Sequence
  Quasi-synthetic sequence derived from human genome
LIQKIYRGWKCRTHFLLMKKSQIVIAAWYRRYAQQKRY

SEQ ID NO: 30369 - protein, 38 aa, Artificial Sequence
  Quasi-synthetic sequence derived from human genome
LRFLRLCRSFYITCRRLRCFPQPPRRNWLLGHLGMYLP

SEQ ID NO: 30370 - protein, 38 aa, Artificial Sequence
  Quasi-synthetic sequence derived from human genome
RARRRRRRRRRRDLLLSQLCFLASVALLLWSLSSLREQ

SEQ ID NO: 30371 - protein, 38 aa, Artificial Sequence
  Quasi-synthetic sequence derived from human genome
IILKLYRVLQLFLSRTAQRSALLSSGRLLRRLGLLLLP

SEQ ID NO: 30372 - protein, 38 aa, Artificial Sequence
  Quasi-synthetic sequence derived from human genome
MASWLRRKLRGKRRPVIAFCLLMILSAMAVTRFPPQRP

SEQ ID NO: 30373 - protein, 38 aa, Artificial Sequence
  Quasi-synthetic sequence derived from human genome
KQIKRKAPRGFLKRVFKRKKPQLRLEKSGDLLVRFHPF

SEQ ID NO: 30374 - protein, 38 aa, Artificial Sequence
  Quasi-synthetic sequence derived from human genome
VRRVVQIFRIMRILRILKLARHSTGLQSLGFTLRRSYN

SEQ ID NO: 30375 - protein, 38 aa, Artificial Sequence
  Quasi-synthetic sequence derived from human genome
KKRNSTLYITMLLIVPVIVAGAIIVLLLYLKRLKIIIF

SEQ ID NO: 30376 - protein, 38 aa, Artificial Sequence
  Quasi-synthetic sequence derived from human genome
RWAGYRPGPVRRRGKVELIKFVRVQWRRPQVEWRRRRW

SEQ ID NO: 30377 - protein, 38 aa, Artificial Sequence
  Quasi-synthetic sequence derived from human genome
KKAQLMQYLSLPKTPKMLKMSKGLDARSKRWLKIIWRR

SEQ ID NO: 30378 - protein, 38 aa, Artificial Sequence
  Quasi-synthetic sequence derived from human genome
WMRIFIQAKRVKTKHLCYCLYRPRKYLYVTSSFKGAFK

SEQ ID NO: 30379 - protein, 38 aa, Artificial Sequence
  Quasi-synthetic sequence derived from human genome
RATVRALWFWAFSLQAKVWATWLAFVLERRRKKARLQW

SEQ ID NO: 30380 - protein, 38 aa, Artificial Sequence
  Quasi-synthetic sequence derived from human genome
TFFFIIGLWWCTKSILKYICKKQKRTCYLGSKTLFYRL

SEQ ID NO: 30381 - protein, 38 aa, Artificial Sequence
  Quasi-synthetic sequence derived from human genome
WALIAIAIVAVLLVLTCCFCICKKCLFKKKNKKKGKEK

SEQ ID NO: 30382 - protein, 38 aa, Artificial Sequence
  Quasi-synthetic sequence derived from human genome
IRFLPLFKIIVPILIRIADVQIKKRLSLMYSITKGYIK

SEQ ID NO: 30383 - protein, 38 aa, Artificial Sequence
  Quasi-synthetic sequence derived from human genome
KGIQCFLVVVALLCVPWMLLFKPLVLRRQYLRRKHLGT

SEQ ID NO: 30384 - protein, 38 aa, Artificial Sequence
  Quasi-synthetic sequence derived from human genome
VLLLKKLKAWNDIKKVYASQRMRAGKGKMRNRRRIQRR

SEQ ID NO: 30385 - protein, 38 aa, Artificial Sequence
  Quasi-synthetic sequence derived from human genome
NKKLKKSIKIIFIVVAAFLVSWLPFNTFKFLAIVSGLR

SEQ ID NO: 30386 - protein, 38 aa, Artificial Sequence
  Quasi-synthetic sequence derived from human genome
IFCKKCILRWLARQKTCPCCRKEVKRKKVVHMNKLRKT

SEQ ID NO: 30387 - protein, 38 aa, Artificial Sequence
  Quasi-synthetic sequence derived from human genome
LVIPLLNPFIYSLRNKEVINIMKKIMKKRKFCHILKQM

SEQ ID NO: 30388 - protein, 38 aa, Artificial Sequence
  Quasi-synthetic sequence derived from human genome
WILVLSLSLAGALFLLAGLVAVALVVRKVKLRNLQKKR

SEQ ID NO: 30389 - protein, 38 aa, Artificial Sequence
  Quasi-synthetic sequence derived from human genome
LKRRYSFRLHIGRNIARPWKLIYYRAKKMFDVNNYKGR

SEQ ID NO: 30390 - protein, 38 aa, Artificial Sequence
  Quasi-synthetic sequence derived from human genome
RAFRRANARCFWNARLARAASRLAFQGWLRRGVLLVRA

SEQ ID NO: 30391 - protein, 38 aa, Artificial Sequence
  Quasi-synthetic sequence derived from human genome
WFRGNMQKKCYGKIKASVLLIQAFVRGWKARKNYRKYF

SEQ ID NO: 30392 - protein, 38 aa, Artificial Sequence
  Quasi-synthetic sequence derived from human genome
KRYPQPRGQKKKKVVKYGMGGMIIVLLICIVWFPLLFM

SEQ ID NO: 30393 - protein, 38 aa, Artificial Sequence
  Quasi-synthetic sequence derived from human genome
RIDSEVYKTARALRIVRFTKILSLLRLLRLSRLIRYIH

SEQ ID NO: 30394 - protein, 38 aa, Artificial Sequence
  Quasi-synthetic sequence derived from human genome
PLALAPRKPQPCRCRRRVRPSIRLLSPVLSLILLLIAL

SEQ ID NO: 30395 - protein, 38 aa, Artificial Sequence
  Quasi-synthetic sequence derived from human genome
MMFVRNDCKVFRFCKSKCHKNFKKKRNPRKVRWTKAFR

SEQ ID NO: 30396 - protein, 38 aa, Artificial Sequence
  Quasi-synthetic sequence derived from human genome
RLLRIFKVTKYWASLRNLVVSLLNSMKSIISLLFLLFL

SEQ ID NO: 30397 - protein, 38 aa, Artificial Sequence
  Quasi-synthetic sequence derived from human genome
KYRATICAKHKLYQFLHLRKAAITIQSSYRRLMVKKKL

SEQ ID NO: 30398 - protein, 38 aa, Artificial Sequence
  Quasi-synthetic sequence derived from human genome
RHKLLKLSVLLPLIFTILLLLLVAASLLAWRMMKYQQK

SEQ ID NO: 30399 - protein, 38 aa, Artificial Sequence
  Quasi-synthetic sequence derived from human genome
IYCFYVYGARLYCLKIHGLSSLWRLFRGKKWNVLRQRV

SEQ ID NO: 30400 - protein, 38 aa, Artificial Sequence
  Quasi-synthetic sequence derived from human genome
RRELSLGRKKAPHRLCGRFSRISMKLPRIPLRRQKLPK

SEQ ID NO: 30401 - protein, 38 aa, Artificial Sequence
  Quasi-synthetic sequence derived from human genome
LRYYYNKRILHKTKGKRFTYKFNFNKLVMPNYPFINIR

SEQ ID NO: 30402 - protein, 38 aa, Artificial Sequence
  Quasi-synthetic sequence derived from human genome
KVLRGYRYRKEFLRQRRAAVTLQAWWRGYCNRRNFKLI

SEQ ID NO: 30403 - protein, 38 aa, Artificial Sequence
  Quasi-synthetic sequence derived from human genome
NQFIKMMIIFSIAFITVLIFKVYMFKCVWRCYRLIKCM

SEQ ID NO: 30404 - protein, 38 aa, Artificial Sequence
  Quasi-synthetic sequence derived from human genome
KIIRTIFKRLKSFICPKLHMGFKSSLRSQLSKYTAKIV

SEQ ID NO: 30405 - protein, 38 aa, Artificial Sequence
  Quasi-synthetic sequence derived from human genome
LAMFFLLVLILSSVFLFRLFKRRQGRIFPEGKMWKLTF

SEQ ID NO: 30406 - protein, 38 aa, Artificial Sequence
  Quasi-synthetic sequence derived from human genome
FRLKKVVKWYLSGFYKKPKGLKKPYNPILGETFRCLWI

SEQ ID NO: 30407 - protein, 38 aa, Artificial Sequence
  Quasi-synthetic sequence derived from human genome
RKKRSWYLTWKYKLTNQRALRRFCQTGAVLFLLVTVIV

SEQ ID NO: 30408 - protein, 38 aa, Artificial Sequence
  Quasi-synthetic sequence derived from human genome
KKAVWHKLLSKQRKRAVVACFRMAPLYNLPRHRSINLF

SEQ ID NO: 30409 - protein, 38 aa, Artificial Sequence
  Quasi-synthetic sequence derived from human genome
VCANGLLIYKDRLRINRFAWPKILKISYKRSNFYIKVR

SEQ ID NO: 30410 - protein, 38 aa, Artificial Sequence
  Quasi-synthetic sequence derived from human genome
KFIRIFQLSNNIRSVVLRHCKKRQSHLRLTLKNNVFLF

SEQ ID NO: 30411 - protein, 38 aa, Artificial Sequence
  Quasi-synthetic sequence derived from human genome
LRTAMRRQMRRHASRRGPSRRRLGRLWNRLFHRPRAPR

SEQ ID NO: 30412 - protein, 38 aa, Artificial Sequence
  Quasi-synthetic sequence derived from human genome
CVHLLKIKNTFCLWKRLIKLKDNHCEQLRVKIRKLKNK

SEQ ID NO: 30413 - protein, 38 aa, Artificial Sequence
  Quasi-synthetic sequence derived from human genome
RRRRRAKITGRERKAMRVLPVVVGAFLLCWTPFFVVHI

SEQ ID NO: 30414 - protein, 38 aa, Artificial Sequence
  Quasi-synthetic sequence derived from human genome
VMLIQAAIRSWLTRKHIQRLHAAATVIKRAWQKWRIRM

SEQ ID NO: 30415 - protein, 38 aa, Artificial Sequence
  Quasi-synthetic sequence derived from human genome
VMKFFRWVRRAWQRIISWVFFWRQKIKPTISGHPDSKK

SEQ ID NO: 30416 - protein, 38 aa, Artificial Sequence
  Quasi-synthetic sequence derived from human genome
KWFVKAGGVAMYAVSWCFMFSIWRFAWRKSIKKYHAWR

SEQ ID NO: 30417 - protein, 38 aa, Artificial Sequence
  Quasi-synthetic sequence derived from human genome
KTWIFRKTYIGWKTWIFSGRCGLTGRPGFGGRRRFFWK

SEQ ID NO: 30418 - protein, 38 aa, Artificial Sequence
  Quasi-synthetic sequence derived from human genome
KRVRFTKRKQKVPGFPKRFTVKPVVLGFPYFHSGRHFW

SEQ ID NO: 30419 - protein, 38 aa, Artificial Sequence
  Quasi-synthetic sequence derived from human genome
LPARPWPRWLGVAALGLAAVALGTVAWRRAWPRRRRRL

SEQ ID NO: 30420 - protein, 38 aa, Artificial Sequence
  Quasi-synthetic sequence derived from human genome
RKKFMITPKLIRMVTVMQAHVRGWLERKRLQRVMTKAL

SEQ ID NO: 30421 - protein, 38 aa, Artificial Sequence
  Quasi-synthetic sequence derived from human genome
LIWKNYKKYIIIAFILIILIIFLVLFIYTLPGAISRRI

SEQ ID NO: 30422 - protein, 38 aa, Artificial Sequence
  Quasi-synthetic sequence derived from human genome
SRKWAKKSHMTWAHARLCFLLGRLSIRKVKLSQARVYF

SEQ ID NO: 30423 - protein, 38 aa, Artificial Sequence
  Quasi-synthetic sequence derived from human genome
KRRERAVAIVRLVLGFLWPLLTLTICYTFILLRTWSRR

SEQ ID NO: 30424 - protein, 38 aa, Artificial Sequence
  Quasi-synthetic sequence derived from human genome
LYKRYGGFLRRIRPKLKWDNQKRYGGFLRRQFKVVTRS

SEQ ID NO: 30425 - protein, 38 aa, Artificial Sequence
  Quasi-synthetic sequence derived from human genome
RPKKRAKTITFSKNAVISKRGGKLCLLIRVANLRKSLL

SEQ ID NO: 30426 - protein, 38 aa, Artificial Sequence
  Quasi-synthetic sequence derived from human genome
RLSFVYNHYLFFACILVVLLAIFLYLLRLRRIHHRQTR

SEQ ID NO: 30427 - protein, 38 aa, Artificial Sequence
  Quasi-synthetic sequence derived from human genome
ALLLKRFLLARRSRRGLFAQIVLPALFVGLALVFSLIV

SEQ ID NO: 30428 - protein, 38 aa, Artificial Sequence
  Quasi-synthetic sequence derived from human genome
KVYKSIYFLGHIFFLSLLFILPYIHKAMVPRKEKLKKM

SEQ ID NO: 30429 - protein, 38 aa, Artificial Sequence
  Quasi-synthetic sequence derived from human genome
ILYNLVSANFRHIFLATLACLCPVWRRRRKRPAFSRKA

SEQ ID NO: 30430 - protein, 38 aa, Artificial Sequence
  Quasi-synthetic sequence derived from human genome
RLRHPRTRWKNWWVRGILTLAMIAFFFIIIYLGPMVLM

SEQ ID NO: 30431 - protein, 38 aa, Artificial Sequence
  Quasi-synthetic sequence derived from human genome
KKAVWHKLLSKQRKRAVVACFRMAPLYNLPRHRAVNLF

SEQ ID NO: 30432 - protein, 38 aa, Artificial Sequence
  Quasi-synthetic sequence derived from human genome
LRFFYSLFFPGLIVCGTLCVCLVIVLWGIRLLLQRKKK

SEQ ID NO: 30433 - protein, 38 aa, Artificial Sequence
  Quasi-synthetic sequence derived from human genome
WRRRKSLWLALSASWLLLVLLGGFSLLRLALPPRPRPG

SEQ ID NO: 30434 - protein, 38 aa, Artificial Sequence
  Quasi-synthetic sequence derived from human genome
WLSLLYKRLIGPKVLAVHVAGLQRKPRPGRVIRDKLRI

SEQ ID NO: 30435 - protein, 38 aa, Artificial Sequence
  Quasi-synthetic sequence derived from human genome
SWWRGTLGRRKAAKRKWAAQTIRRLIRGFVLRHAPRCP

SEQ ID NO: 30436 - protein, 38 aa, Artificial Sequence
  Quasi-synthetic sequence derived from human genome
RNVKFPLPIYKSKKGWTAYKLQLFKMFPIILAILVSWL

SEQ ID NO: 30437 - protein, 38 aa, Artificial Sequence
  Quasi-synthetic sequence derived from human genome
RFLCGFLVPVLIITACYLTIVCKLQRNRLAKTKKPFKI

SEQ ID NO: 30438 - protein, 38 aa, Artificial Sequence
  Quasi-synthetic sequence derived from human genome
RRKFLQMKRRKYGFIYKTHLFGRPTVRVMGADNVRRIL

SEQ ID NO: 30439 - protein, 38 aa, Artificial Sequence
  Quasi-synthetic sequence derived from human genome
LRRFQGLLLDRRGRLHGQVLRLREVARRLERLRRRSLV

SEQ ID NO: 30440 - protein, 38 aa, Artificial Sequence
  Quasi-synthetic sequence derived from human genome
KVQWCSLSVIKLKNKIKYRAEACIKMQKTIRMWLCKRR

SEQ ID NO: 30441 - protein, 38 aa, Artificial Sequence
  Quasi-synthetic sequence derived from human genome
RYLRVKLTVRFRIPGLPGCILSFQLKVCFLPVMWLFIL

SEQ ID NO: 30442 - protein, 38 aa, Artificial Sequence
  Quasi-synthetic sequence derived from human genome
RIGRILRLVRAARGIRTLLFALMMSLPSLFNIGLLLFL

SEQ ID NO: 30443 - protein, 38 aa, Artificial Sequence
  Quasi-synthetic sequence derived from human genome
RFSWFCKRRRAFWHTPRLPTLPKRVPRAGEARNLRVLR

SEQ ID NO: 30444 - protein, 38 aa, Artificial Sequence
  Quasi-synthetic sequence derived from human genome
IRHMIRKNKYRPDLRMAAIRRASAILRSQKPVMVKRKR

SEQ ID NO: 30445 - protein, 38 aa, Artificial Sequence
  Quasi-synthetic sequence derived from human genome
LLRRWKHWLLLLGICCPKPHGRVSSRLRLSRSLGHFFH

SEQ ID NO: 30446 - protein, 38 aa, Artificial Sequence
  Quasi-synthetic sequence derived from human genome
SLLVVKLNRNRMSMIPPKIFKLPHLQFLELKRNRIKIV

SEQ ID NO: 30447 - protein, 38 aa, Artificial Sequence
  Quasi-synthetic sequence derived from human genome
AMFAKTWRVHAIFKNVKMKKKIIKDQKLLVIVGGMLLI

SEQ ID NO: 30448 - protein, 38 aa, Artificial Sequence
  Quasi-synthetic sequence derived from human genome
MVRFVVRKTVQRSVAKGSRRCKKRMFKFHQMKHIFEIL

SEQ ID NO: 30449 - protein, 38 aa, Artificial Sequence
  Quasi-synthetic sequence derived from human genome
FYLSLFFWMLFKALLIIYGILVIFRRMMKSRMMVIGFA

SEQ ID NO: 30450 - protein, 38 aa, Artificial Sequence
  Quasi-synthetic sequence derived from human genome
PTQKTARLFSKKIFCCLFFITLFFIRLLSYMFFHVRFI

SEQ ID NO: 30451 - protein, 38 aa, Artificial Sequence
  Quasi-synthetic sequence derived from human genome
LRLTPGLRKVLFATALGTVALALAAHQLKRRRRRKKQV

SEQ ID NO: 30452 - protein, 38 aa, Artificial Sequence
  Quasi-synthetic sequence derived from human genome
SKLVLKLPWTQVGFSLLFLYLGSGGWRFIRVFIKTIRR

SEQ ID NO: 30453 - protein, 38 aa, Artificial Sequence
  Quasi-synthetic sequence derived from human genome
RLKIKQILPTIYKRKNLSLFLSISLLIFWGSSLLGARL

SEQ ID NO: 30454 - protein, 38 aa, Artificial Sequence
  Quasi-synthetic sequence derived from human genome
KYVLARRRLVKVINNRAKLLSLCSFIIETCLFILWRHL

SEQ ID NO: 30455 - protein, 38 aa, Artificial Sequence
  Quasi-synthetic sequence derived from human genome
WRRRHCCFAKMTWNAKRSLFRTHLIGVLSLVFLFAMFL

SEQ ID NO: 30456 - protein, 38 aa, Artificial Sequence
  Quasi-synthetic sequence derived from human genome
RRRRARSSVCRRKVAQAREKRFTFVLAVVMGVFVLCWF

SEQ ID NO: 30457 - protein, 38 aa, Artificial Sequence
  Quasi-synthetic sequence derived from human genome
LKQKARRLTILLLLAFYVCFLPFHILRVIRIESRLLSI

SEQ ID NO: 30458 - protein, 38 aa, Artificial Sequence
  Quasi-synthetic sequence derived from human genome
KPPISRAKMILITKAAIKAIKLYKHVVQIVEKFIKKCK

SEQ ID NO: 30459 - protein, 38 aa, Artificial Sequence
  Quasi-synthetic sequence derived from human genome
LVWRVLHALLCLHRTLTSWLRVRFGTWNWIWRRCCRAA

SEQ ID NO: 30460 - protein, 38 aa, Artificial Sequence
  Quasi-synthetic sequence derived from human genome
FFRILRIFKLIAPKLLQIIDKRMSHQKTFWYGILKGYV

SEQ ID NO: 30461 - protein, 38 aa, Artificial Sequence
  Quasi-synthetic sequence derived from human genome
FLKITSTRLLCSRLCQQLRSKRKFFGTVPISRLHRRVV

SEQ ID NO: 30462 - protein, 38 aa, Artificial Sequence
  Quasi-synthetic sequence derived from human genome
RKGRHMGIGKRKGTANARMPEKVTWMRRMRILRRLLRR

SEQ ID NO: 30463 - protein, 38 aa, Artificial Sequence
  Quasi-synthetic sequence derived from human genome
CRKNYGLMRLGFLRLQALHRSRKLHQQYRLARQRIIQF

SEQ ID NO: 30464 - protein, 38 aa, Artificial Sequence
  Quasi-synthetic sequence derived from human genome
LMAHPFLLLILLCMSLLLFQVIRLYQRRRWMIRALHLF

SEQ ID NO: 30465 - protein, 38 aa, Artificial Sequence
  Quasi-synthetic sequence derived from human genome
FVALLWKRLLIARRSRKGFFAQIVLPAVFVCIALVFSL

SEQ ID NO: 30466 - protein, 38 aa, Artificial Sequence
  Quasi-synthetic sequence derived from human genome
MLRTLLRRRLFSYPTKYYFMVLVLSLITFSVLRIHQKP

SEQ ID NO: 30467 - protein, 38 aa, Artificial Sequence
  Quasi-synthetic sequence derived from human genome
VGALLALALVGVLILFMFRRLRQFRQAQPTPQYRFRKR

SEQ ID NO: 30468 - protein, 38 aa, Artificial Sequence
  Quasi-synthetic sequence derived from human genome
AKVKMKFRFLGKLMAKAIMDFRLVDLPLGLPFYKWMLR

SEQ ID NO: 30469 - protein, 38 aa, Artificial Sequence
  Quasi-synthetic sequence derived from human genome
FKFNIAVGLILCISLVILTFQWRFYLSFRKLMRWILIL

SEQ ID NO: 30470 - protein, 38 aa, Artificial Sequence
  Quasi-synthetic sequence derived from human genome
KLSRALRYYYNKRILHKTKGKRFTYKFNFSKVVLVNYP

SEQ ID NO: 30471 - protein, 38 aa, Artificial Sequence
  Quasi-synthetic sequence derived from human genome
VVLLVRTDKRSDSLIRKKFRMMKIPKPILFGLNIAMKK

SEQ ID NO: 30472 - protein, 38 aa, Artificial Sequence
  Quasi-synthetic sequence derived from human genome
WRVCQKSHCFRLGRQLSKALQVNCVVRKLLVQLRRLYW

SEQ ID NO: 30473 - protein, 38 aa, Artificial Sequence
  Quasi-synthetic sequence derived from human genome
KNLLCLFCLKLFKTAIPYMNHCWRHSRRRVLQCSKCRL

SEQ ID NO: 30474 - protein, 38 aa, Artificial Sequence
  Quasi-synthetic sequence derived from human genome
RGGRGRRLGLALGLLLALVLAPRVLRAKPTVRKERVVR

SEQ ID NO: 30475 - protein, 38 aa, Artificial Sequence
  Quasi-synthetic sequence derived from human genome
FYIRSYILNKDLLRKALILMNSKHTHLILCVLRFMRRM

SEQ ID NO: 30476 - protein, 38 aa, Artificial Sequence
  Quasi-synthetic sequence derived from human genome
KGIDSEVYKTARALRIVRFTKILSLLRLLRLSRLIRYI

SEQ ID NO: 30477 - protein, 38 aa, Artificial Sequence
  Quasi-synthetic sequence derived from human genome
WRVIGYHVVVWMMAGIPLLLFRWKPLWGVRLRLRPCNL

SEQ ID NO: 30478 - protein, 38 aa, Artificial Sequence
  Quasi-synthetic sequence derived from human genome
LLTLLLIAFIFLIIKSYRKYRRERLPISPGPLLRWVPL

SEQ ID NO: 30479 - protein, 38 aa, Artificial Sequence
  Quasi-synthetic sequence derived from human genome
RGRPRLRLGERGLMEPLLPPKRRLLPRVRLLPLLLALA

SEQ ID NO: 30480 - protein, 38 aa, Artificial Sequence
  Quasi-synthetic sequence derived from human genome
IRRKNCPACRLRKCCQAGMVLGGRKFKKFNKVRVVRAL

SEQ ID NO: 30481 - protein, 38 aa, Artificial Sequence
  Quasi-synthetic sequence derived from human genome
FFVRLGPMALAFKVRGLLDCKHSWKRLKDIRKIFPGKK

SEQ ID NO: 30482 - protein, 38 aa, Artificial Sequence
  Quasi-synthetic sequence derived from human genome
IVLAKKMLRKALKLLNRIFPYNLISLFLHIHVEKNRHF

SEQ ID NO: 30483 - protein, 38 aa, Artificial Sequence
  Quasi-synthetic sequence derived from human genome
GFKNIFITMFATFFFFKLLIKVFLALLTHFYIVKGNRK

SEQ ID NO: 30484 - protein, 38 aa, Artificial Sequence
  Quasi-synthetic sequence derived from human genome
LRRQLQRQHKCAIIIQSYYRMHVQQKKWKIMKKAALLI

SEQ ID NO: 30485 - protein, 38 aa, Artificial Sequence
  Quasi-synthetic sequence derived from human genome
FFNSKVALFAAVGAGCVIFLLIIIFLTVLLLKLRKRHR

SEQ ID NO: 30486 - protein, 38 aa, Artificial Sequence
  Quasi-synthetic sequence derived from human genome
AWARMWAARRQYLRRLHYFQKNVNSIVKIQAFFRARKA

SEQ ID NO: 30487 - protein, 38 aa, Artificial Sequence
  Quasi-synthetic sequence derived from human genome
LKIKLAVRMDKPAHMKHSGYLYALGQKVWKRWKKRYFV

SEQ ID NO: 30488 - protein, 38 aa, Artificial Sequence
  Quasi-synthetic sequence derived from human genome
MRRHFRMKLRNLFTKFIRKFGFELVKRLLPEEYHRVLV

SEQ ID NO: 30489 - protein, 38 aa, Artificial Sequence
  Quasi-synthetic sequence derived from human genome
FGAFYIPLLLMLVLYGRIFRAARFRIRKTVKKVEKTGA

SEQ ID NO: 30490 - protein, 38 aa, Artificial Sequence
  Quasi-synthetic sequence derived from human genome
KILLRRPNEKKSKAVRLIFVIMIIFFLFWTPYNLTILI

SEQ ID NO: 30491 - protein, 38 aa, Artificial Sequence
  Quasi-synthetic sequence derived from human genome
ITLGLLVAGVLVLLVSLGVAIHLCCRRRRARLRFMKQF

SEQ ID NO: 30492 - protein, 38 aa, Artificial Sequence
  Quasi-synthetic sequence derived from human genome
RLIRKMFSFKVSRWMGLACFRSLAASSPSIRQKKLMHK

SEQ ID NO: 30493 - protein, 38 aa, Artificial Sequence
  Quasi-synthetic sequence derived from human genome
AIRSWLTRKHIQRLHAAATVIKRAWQKWRIRMACLAAK

SEQ ID NO: 30494 - protein, 38 aa, Artificial Sequence
  Quasi-synthetic sequence derived from human genome
LGMIVFAVMLSILSLIGIFNRSFRTGIKRRILLLIPKW

SEQ ID NO: 30495 - protein, 38 aa, Artificial Sequence
  Quasi-synthetic sequence derived from human genome
RILTGMLRRIIQNRILLVILGIIVVITILMAITFSVRR

SEQ ID NO: 30496 - protein, 38 aa, Artificial Sequence
  Quasi-synthetic sequence derived from human genome
LGFFGPLLVICLCYLLIVVKVRSAGRRVWAPSCQRRRR

SEQ ID NO: 30497 - protein, 38 aa, Artificial Sequence
  Quasi-synthetic sequence derived from human genome
CFLGVAVLVSILAGCLLNRRRAARRRRKRLRQDPPLIF

SEQ ID NO: 30498 - protein, 38 aa, Artificial Sequence
  Quasi-synthetic sequence derived from human genome
LGNKKLKQIFLSVLRHVRYWVKDRSLRLHRFTRGALCV

SEQ ID NO: 30499 - protein, 38 aa, Artificial Sequence
  Quasi-synthetic sequence derived from human genome
HVRIRVIKKKKVIMKKRKKLTLTRPTPLVTAGPLVTPT

SEQ ID NO: 30500 - protein, 38 aa, Artificial Sequence
  Quasi-synthetic sequence derived from human genome
LQQGNMRKNMRVLSRTSKFRRLRQLLRRRKKRQQVRSI

SEQ ID NO: 30501 - protein, 38 aa, Artificial Sequence
  Quasi-synthetic sequence derived from human genome
LLLFVLLLVVRRRRREQRLKRLRDAKSLAEMLMSKNTR

SEQ ID NO: 30502 - protein, 38 aa, Artificial Sequence
  Quasi-synthetic sequence derived from human genome
IAIVSYIPGITIKLLPLRTFRVFRALKAISVVSRLKVI

SEQ ID NO: 30503 - protein, 38 aa, Artificial Sequence
  Quasi-synthetic sequence derived from human genome
VIIQKRFRCFQAQKLYKRRKESILTIQKYYKAYLKGKI

SEQ ID NO: 30504 - protein, 38 aa, Artificial Sequence
  Quasi-synthetic sequence derived from human genome
LLKIKNTFCLWKRLIKLKDNHCEQLRVKIRKLKNKASV

SEQ ID NO: 30505 - protein, 38 aa, Artificial Sequence
  Quasi-synthetic sequence derived from human genome
RPGLRRQWKCVQRRCLRHLAHRLRRRHQRCQRRTPLAV

SEQ ID NO: 30506 - protein, 38 aa, Artificial Sequence
  Quasi-synthetic sequence derived from human genome
LRALLVVVNALLRKRRYHAALAVLKGFRNGAVYGAKIR

SEQ ID NO: 30507 - protein, 38 aa, Artificial Sequence
  Quasi-synthetic sequence derived from human genome
FVKGLIQGAIYAGIVIALLFLCLLPLIVKHIRKKQAKK

SEQ ID NO: 30508 - protein, 38 aa, Artificial Sequence
  Quasi-synthetic sequence derived from human genome
VAVILAFLAAVAAVLISLMWVCNKCAYKFQRKRRHKLK

SEQ ID NO: 30509 - protein, 38 aa, Artificial Sequence
  Quasi-synthetic sequence derived from human genome
LARQRGVGQQAMSLAILRVIRLVRVFRIFKLSRHSKGL

SEQ ID NO: 30510 - protein, 38 aa, Artificial Sequence
  Quasi-synthetic sequence derived from human genome
RKWHKASNYIFVAIFWIVFLLLIVFYTAITKKIFKSHL

SEQ ID NO: 30511 - protein, 38 aa, Artificial Sequence
  Quasi-synthetic sequence derived from human genome
KKKTFKGLIRIFRKGVIAVLAANRLKILGQSCASLFTW

SEQ ID NO: 30512 - protein, 38 aa, Artificial Sequence
  Quasi-synthetic sequence derived from human genome
WRLPRISARAPYRLRRLRRHTYWPPRRPVAASRCWPVG

SEQ ID NO: 30513 - protein, 38 aa, Artificial Sequence
  Quasi-synthetic sequence derived from human genome
LVCLFFVFLSLLEYVYINYLFYSRGPRRQPRRHRRPRR

SEQ ID NO: 30514 - protein, 38 aa, Artificial Sequence
  Quasi-synthetic sequence derived from human genome
KIQRFHARSLWTNHKRYGYKKHSYRLVKKLKLQKMKKN

SEQ ID NO: 30515 - protein, 38 aa, Artificial Sequence
  Quasi-synthetic sequence derived from human genome
MAAGGRWVRQQGPRVRRGISRLWLRVLLRLSPMAFRAL

SEQ ID NO: 30516 - protein, 38 aa, Artificial Sequence
  Quasi-synthetic sequence derived from human genome
KNWKIILCLFIIPLVGCGFVSFRKKPVDKHKKLLWYYV

SEQ ID NO: 30517 - protein, 38 aa, Artificial Sequence
  Quasi-synthetic sequence derived from human genome
VWAIFRPGTSFGISVLRALRLLRIFKITKYWASLRNLV

SEQ ID NO: 30518 - protein, 38 aa, Artificial Sequence
  Quasi-synthetic sequence derived from human genome
KLSKRQLFFRKKLLHSSQMLRAVSLGQDRYRRRYWVLP

SEQ ID NO: 30519 - protein, 38 aa, Artificial Sequence
  Quasi-synthetic sequence derived from human genome
RHGFRCQFANGIFQLWFHFKRYRYRRPGPCWRPIRHCR

SEQ ID NO: 30520 - protein, 38 aa, Artificial Sequence
  Quasi-synthetic sequence derived from human genome
SAISVVKILRVLRVLRPLRAINRAKGLKHVVQCMFVAI

SEQ ID NO: 30521 - protein, 38 aa, Artificial Sequence
  Quasi-synthetic sequence derived from human genome
KLHRVLKVFLSRTAQRIPYMTGGRVMRMLAVILLVVFW

SEQ ID NO: 30522 - protein, 38 aa, Artificial Sequence
  Quasi-synthetic sequence derived from human genome
RFLLKCGFITIPWRCIKKCSPLMPRAAVPRFVQQKLYL

SEQ ID NO: 30523 - protein, 38 aa, Artificial Sequence
  Quasi-synthetic sequence derived from human genome
KAIRFSYPSIHPFILIWGNKKLKQTFLSVLRQVRYWVK

SEQ ID NO: 30524 - protein, 38 aa, Artificial Sequence
  Quasi-synthetic sequence derived from human genome
LRKRRRLLSIIVVLVVTFALCWMPYHLVKTLYMLGSLL

SEQ ID NO: 30525 - protein, 38 aa, Artificial Sequence
  Quasi-synthetic sequence derived from human genome
MSTVMRLRTKMPWKTCWRYLTSGGFFLLILMIFSKLLK

SEQ ID NO: 30526 - protein, 38 aa, Artificial Sequence
  Quasi-synthetic sequence derived from human genome
FKVAVIASIVSCAIILLMSMAFLTCCLLKCVKKSKRRR

SEQ ID NO: 30527 - protein, 38 aa, Artificial Sequence
  Quasi-synthetic sequence derived from human genome
KFLQRLLLVHGRWSYLRMCKFLCYFFYKNFAFTMVHFW

SEQ ID NO: 30528 - protein, 38 aa, Artificial Sequence
  Quasi-synthetic sequence derived from human genome
FKNLFYRTYMLFKNASGKRRFLLCLLLFTVITYFFVVI

SEQ ID NO: 30529 - protein, 38 aa, Artificial Sequence
  Quasi-synthetic sequence derived from human genome
YRRRFVQQKRAAITLQHYFRTWQTRKQFLLYRKAAVVL

SEQ ID NO: 30530 - protein, 38 aa, Artificial Sequence
  Quasi-synthetic sequence derived from human genome
KVRTLKKFIKLLGEIMEHRFKTYQQFRRCLTLRCKLYF

SEQ ID NO: 30531 - protein, 38 aa, Artificial Sequence
  Quasi-synthetic sequence derived from human genome
WKAQRYRLIREFHSRPALAPPFIVISHLRLLLRQLCRR

SEQ ID NO: 30532 - protein, 38 aa, Artificial Sequence
  Quasi-synthetic sequence derived from human genome
KKLPGVMLFKKKKTRKLKIALALSDLVIYTKAEKFKSF

SEQ ID NO: 30533 - protein, 38 aa, Artificial Sequence
  Quasi-synthetic sequence derived from human genome
LSLLLGVARSLWMLLKLRQRLRSPTAPFTSPLPRGKRR

SEQ ID NO: 30534 - protein, 38 aa, Artificial Sequence
  Quasi-synthetic sequence derived from human genome
KWRHHRRLLTPAFHFNILKPYIKIFSKSANIMHAKWQR

SEQ ID NO: 30535 - protein, 38 aa, Artificial Sequence
  Quasi-synthetic sequence derived from human genome
RPHLPGKKKIRWDPVRRRFIQSCPIIRIPNRFLRGHRP

SEQ ID NO: 30536 - protein, 38 aa, Artificial Sequence
  Quasi-synthetic sequence derived from human genome
IYLRVATWNQILDPWVYILFRRAVLRRLQPRLSTRPRR

SEQ ID NO: 30537 - protein, 38 aa, Artificial Sequence
  Quasi-synthetic sequence derived from human genome
LLFGLEIRMRRIVFAGVILFRLLGVILFRLLGVILFGR

SEQ ID NO: 30538 - protein, 38 aa, Artificial Sequence
  Quasi-synthetic sequence derived from human genome
KRLLPLLSLIFPTVLHGVLHYIISSVIQKFVLLILKRK

SEQ ID NO: 30539 - protein, 38 aa, Artificial Sequence
  Quasi-synthetic sequence derived from human genome
RSGKKKMSKLSRSARAGVIFPVGRLMRYLKKGTFKYRI

SEQ ID NO: 30540 - protein, 38 aa, Artificial Sequence
  Quasi-synthetic sequence derived from human genome
KSKTKSKYASYLSFIKILLKRGGVRVSTKNLIKLFQII

SEQ ID NO: 30541 - protein, 38 aa, Artificial Sequence
  Quasi-synthetic sequence derived from human genome
RTLMHLSRCAIRRTLHNRCHRAIPLLSLPLSLKKYLLL

SEQ ID NO: 30542 - protein, 38 aa, Artificial Sequence
  Quasi-synthetic sequence derived from human genome
ISLKMIPRIDYDRIKARMSLKDWFAKRKKFKRPPQRLF

SEQ ID NO: 30543 - protein, 38 aa, Artificial Sequence
  Quasi-synthetic sequence derived from human genome
LLRLRNKLRGVQRNLAGSLVRLSALVKSKQKAYFILSL

SEQ ID NO: 30544 - protein, 38 aa, Artificial Sequence
  Quasi-synthetic sequence derived from human genome
FMVFFLINPTKTFYYKSRFWLLKLLFRVFTAPFHKVGF

SEQ ID NO: 30545 - protein, 38 aa, Artificial Sequence
  Quasi-synthetic sequence derived from human genome
RRWKKKQLRRPSLLLLGCCSFGIMAPSLWKGLVGIGLF

SEQ ID NO: 30546 - protein, 38 aa, Artificial Sequence
  Quasi-synthetic sequence derived from human genome
LAILIMRLKMFLTPHMCVMASLICSRQLFGWLFRRVRF

SEQ ID NO: 30547 - protein, 38 aa, Artificial Sequence
  Quasi-synthetic sequence derived from human genome
LFLLALLGLVVKRAVERRKALSRRARRLAVRMRALESS

SEQ ID NO: 30548 - protein, 38 aa, Artificial Sequence
  Quasi-synthetic sequence derived from human genome
WVKFIIGYLFPLLTMSICYLCLIFKVKKRSILISSRHF

SEQ ID NO: 30549 - protein, 38 aa, Artificial Sequence
  Quasi-synthetic sequence derived from human genome
HWRGVSFVYNHYLFSGCFLVVLLAILLYLLRLRRIHRR

SEQ ID NO: 30550 - protein, 38 aa, Artificial Sequence
  Quasi-synthetic sequence derived from human genome
VALVLHLRAHSAAKRPIACPKCERRFWRRKQLRAHLRR

SEQ ID NO: 30551 - protein, 38 aa, Artificial Sequence
  Quasi-synthetic sequence derived from human genome
FSKKFKLWLLNALEGVPALLQISKLKEVTLFVKRLRRK

SEQ ID NO: 30552 - protein, 38 aa, Artificial Sequence
  Quasi-synthetic sequence derived from human genome
LHISVMGGLIALLLLLLVFTVALYAQRRWQKRRRIPQK

SEQ ID NO: 30553 - protein, 38 aa, Artificial Sequence
  Quasi-synthetic sequence derived from human genome
KFKKFAARKKWKQSVRLISLCQRLSRSFLSRSNMSVAR

SEQ ID NO: 30554 - protein, 38 aa, Artificial Sequence
  Quasi-synthetic sequence derived from human genome
KKFLYIKSVFHTLRMAQRRHKRVRTWTRHINIFNKDYI

SEQ ID NO: 30555 - protein, 38 aa, Artificial Sequence
  Quasi-synthetic sequence derived from human genome
VIGILVAVVLLLLLLLLLFLILRHRRQGKHWTSTQRKA

SEQ ID NO: 30556 - protein, 38 aa, Artificial Sequence
  Quasi-synthetic sequence derived from human genome
ALGLLILLRLWRVARIINGIIISVKTRSERQLLRLKQM

SEQ ID NO: 30557 - protein, 38 aa, Artificial Sequence
  Quasi-synthetic sequence derived from human genome
LLVIMVGKQVINNMQEVLIPKLKGWWQKFRLRSKKRKA

SEQ ID NO: 30558 - protein, 38 aa, Artificial Sequence
  Quasi-synthetic sequence derived from human genome
ARKQLMIYRLPQVLRLHLKRFRWSGRNHREKIGVHVVF

SEQ ID NO: 30559 - protein, 38 aa, Artificial Sequence
  Quasi-synthetic sequence derived from human genome
RISITFFRLFRVMRLVKLLSRGEGIRTLLWTFIKSFQA

SEQ ID NO: 30560 - protein, 38 aa, Artificial Sequence
  Quasi-synthetic sequence derived from human genome
WRGTLARMRYKRTKAALTIIRYYRRYKVKSYIHEVARR

SEQ ID NO: 30561 - protein, 38 aa, Artificial Sequence
  Quasi-synthetic sequence derived from human genome
FFILRRKPVEQKKIFTIQGCYPVIRCLLRRRGWVEKKM

SEQ ID NO: 30562 - protein, 38 aa, Artificial Sequence
  Quasi-synthetic sequence derived from human genome
LFTPVVVACMSIMALLLLLLLLLLYKYKQKPKYQVRWK

SEQ ID NO: 30563 - protein, 38 aa, Artificial Sequence
  Quasi-synthetic sequence derived from human genome
LLRKLGVKLVQRLGLTFLKPKVAAWRYQRGCRSLAANL

SEQ ID NO: 30564 - protein, 38 aa, Artificial Sequence
  Quasi-synthetic sequence derived from human genome
KGMDSEVYKTARALRIVRFTKILSLLRLLRLSRLIRYI

SEQ ID NO: 30565 - protein, 38 aa, Artificial Sequence
  Quasi-synthetic sequence derived from human genome
LYKKGVYLSHTGGKMLFWVLGLLILCGFLWTRKGKLKI

SEQ ID NO: 30566 - protein, 38 aa, Artificial Sequence
  Quasi-synthetic sequence derived from human genome
RCAADAGMKRALGRRKGVWLRLRKILFCVLGLYIAIPF

SEQ ID NO: 30567 - protein, 38 aa, Artificial Sequence
  Quasi-synthetic sequence derived from human genome
RLRNAKIYVERAVKQKKIFTIQGCYPVIRCLLRRRGWV

SEQ ID NO: 30568 - protein, 38 aa, Artificial Sequence
  Quasi-synthetic sequence derived from human genome
WFQFYLTFPLIFGLFIILLVIFLIWRCFLRNKTRRQTV

SEQ ID NO: 30569 - protein, 38 aa, Artificial Sequence
  Quasi-synthetic sequence derived from human genome
RRTRSGVGWKRVLRSLCHSRTRVPLLAAIYFLMIHVLL

SEQ ID NO: 30570 - protein, 38 aa, Artificial Sequence
  Quasi-synthetic sequence derived from human genome
LRKNLKSLIIVHPSWFIRTLLAVTRPFISSKFSQKIRY

SEQ ID NO: 30571 - protein, 38 aa, Artificial Sequence
  Quasi-synthetic sequence derived from human genome
KKRMFKFHQMKHIFEILDKMRCLRKRSTVSFLGVLVIF

SEQ ID NO: 30572 - protein, 38 aa, Artificial Sequence
  Quasi-synthetic sequence derived from human genome
LRILRKRNKALRKIRKLQKQGLLQVTPKGFICTVDTIK

SEQ ID NO: 30573 - protein, 38 aa, Artificial Sequence
  Quasi-synthetic sequence derived from human genome
PAAAAPRASGRCVIAPVRAVLRLRRRVCVLRKRRLLQP

SEQ ID NO: 30574 - protein, 38 aa, Artificial Sequence
  Quasi-synthetic sequence derived from human genome
LKKKLFLTLKENEKLRKRLQAQRLVMRRMSSRLRACKG

SEQ ID NO: 30575 - protein, 38 aa, Artificial Sequence
  Quasi-synthetic sequence derived from human genome
IHLPIYRHLRRFILSVIVFGSIVLLMLWLPIRIIKSVL

SEQ ID NO: 30576 - protein, 38 aa, Artificial Sequence
  Quasi-synthetic sequence derived from human genome
RYYRLAPMRLYTLSKRHFVLVFVVFFICFGLTIFVGIR

SEQ ID NO: 30577 - protein, 38 aa, Artificial Sequence
  Quasi-synthetic sequence derived from human genome
WGKVSLFWGWARHRSLCFLVVACLKVKTCLVCRFRISL

SEQ ID NO: 30578 - protein, 38 aa, Artificial Sequence
  Quasi-synthetic sequence derived from human genome
KAKLHAALYERKLLSLEVRKRRRRSSRLRAMRPKYPVI

SEQ ID NO: 30579 - protein, 38 aa, Artificial Sequence
  Quasi-synthetic sequence derived from human genome
LRTFRLLRVLKLVRFMPALRRQLVVLMKTMDNVATFCM

SEQ ID NO: 30580 - protein, 38 aa, Artificial Sequence
  Quasi-synthetic sequence derived from human genome
TLKWKIFTNFKMNILGLLIPFTIFMFCYIKILHQLKRC

SEQ ID NO: 30581 - protein, 38 aa, Artificial Sequence
  Quasi-synthetic sequence derived from human genome
FLRVVRFVRILRIFKLTRHFVGLRVLGHTLRASTNEFL

SEQ ID NO: 30582 - protein, 38 aa, Artificial Sequence
  Quasi-synthetic sequence derived from human genome
MLWALWPRWLADKMLPLLGAVLLQKREKRGPLWRHWRR

SEQ ID NO: 30583 - protein, 38 aa, Artificial Sequence
  Quasi-synthetic sequence derived from human genome
RCKKLRNGVKYCKVLRLPEILCIHLKRFRHEVMYSFKI

SEQ ID NO: 30584 - protein, 38 aa, Artificial Sequence
  Quasi-synthetic sequence derived from human genome
LLKGAFPARLKKVLIVGAPIWFRVPYSIISLLLKDKVR

SEQ ID NO: 30585 - protein, 38 aa, Artificial Sequence
  Quasi-synthetic sequence derived from human genome
AKMFPKVRESQLLLNVVSQLAKRNLRLLVLGRKHMLRR

SEQ ID NO: 30586 - protein, 38 aa, Artificial Sequence
  Quasi-synthetic sequence derived from human genome
LYHARLWLHVLPTLPGTLCLRIFRWGPRRRRQGSRTLL

SEQ ID NO: 30587 - protein, 38 aa, Artificial Sequence
  Quasi-synthetic sequence derived from human genome
LLRLIILIRIFHLLHQKRQLEKLMRRLVSENKRRYTRD

SEQ ID NO: 30588 - protein, 38 aa, Artificial Sequence
  Quasi-synthetic sequence derived from human genome
ARRGWRRAPLRRGVGSSPRARRLMRPLWLLLAVGVFDW

SEQ ID NO: 30589 - protein, 38 aa, Artificial Sequence
  Quasi-synthetic sequence derived from human genome
ILQIRKLRHRLSNFPRLPGILAPETVLLPFCYKVFRKK

SEQ ID NO: 30590 - protein, 38 aa, Artificial Sequence
  Quasi-synthetic sequence derived from human genome
ACIKMQKTIRMWLCKRRHKPRIDGLVKVGTLKKRLDKF

SEQ ID NO: 30591 - protein, 38 aa, Artificial Sequence
  Quasi-synthetic sequence derived from human genome
IKYLRKSLKIIYLNSIQELEIRNMSWPRLIRKLRCYLK

SEQ ID NO: 30592 - protein, 38 aa, Artificial Sequence
  Quasi-synthetic sequence derived from human genome
RPVFPCRRRFCPRPFLVGLVVAICLFYQTLTLRGSRKL

SEQ ID NO: 30593 - protein, 38 aa, Artificial Sequence
  Quasi-synthetic sequence derived from human genome
LRRLQSLPKCERLPLPSFLLLPFQRITRLRMLLQNILR

SEQ ID NO: 30594 - protein, 38 aa, Artificial Sequence
  Quasi-synthetic sequence derived from human genome
GLFHLLVQKSKKSSTFKFYRRHKMPAPAQRKLLPRRHL

SEQ ID NO: 30595 - protein, 38 aa, Artificial Sequence
  Quasi-synthetic sequence derived from human genome
RVVHLQLLRRHTLRAAERNVRRKKVSFQLERIIKKQRL

SEQ ID NO: 30596 - protein, 38 aa, Artificial Sequence
  Quasi-synthetic sequence derived from human genome
ARTSIRASLTFNRGFKAGRNMRRKLFGVLRLKCHSLFL

SEQ ID NO: 30597 - protein, 38 aa, Artificial Sequence
  Quasi-synthetic sequence derived from human genome
VLIWIHCFTVYLVPCSIFFILNSIIVYKLRRKSNFRLR

SEQ ID NO: 30598 - protein, 38 aa, Artificial Sequence
  Quasi-synthetic sequence derived from human genome
LKTLLRCRNEKKRHRAVRVIFTIMIVYFLFWTPYNIVI

SEQ ID NO: 30599 - protein, 38 aa, Artificial Sequence
  Quasi-synthetic sequence derived from human genome
VGLVLRVLRALRILYVMRLARHSLGLQTLGLTARRCTR

SEQ ID NO: 30600 - protein, 38 aa, Artificial Sequence
  Quasi-synthetic sequence derived from human genome
RAWIRLSLEKKLLSQHLKQLLSNQPLTKKLYKRYAFLR

SEQ ID NO: 30601 - protein, 38 aa, Artificial Sequence
  Quasi-synthetic sequence derived from human genome
ILKQKAPQQYRIRAKLRSYKPRRLFQSVKLHCPKCHLL

SEQ ID NO: 30602 - protein, 38 aa, Artificial Sequence
  Quasi-synthetic sequence derived from human genome
ARVITPEDLLFLMRKDKKKLRRLLKYMFIRDYKSKIVK

SEQ ID NO: 30603 - protein, 38 aa, Artificial Sequence
  Quasi-synthetic sequence derived from human genome
MRRAKRIRLELQNAALQHLFIRKSFRPFKCLQCGKAFR

SEQ ID NO: 30604 - protein, 38 aa, Artificial Sequence
  Quasi-synthetic sequence derived from human genome
ILLLQSWFRMVLERRHFLQMKRAAVTIQACWRSYRVRR

SEQ ID NO: 30605 - protein, 38 aa, Artificial Sequence
  Quasi-synthetic sequence derived from human genome
LDVIAFLLACVATMIFMITKCCLFCFRKLAKTGKKKKR

SEQ ID NO: 30606 - protein, 38 aa, Artificial Sequence
  Quasi-synthetic sequence derived from human genome
VLPKPRMRGLLARRLRNHMAVAFVLSLGVAALYKFRVA

SEQ ID NO: 30607 - protein, 38 aa, Artificial Sequence
  Quasi-synthetic sequence derived from human genome
RRRQGWLKEIRKLQKSTHLLIRKLPFSRLAREICVKFT

SEQ ID NO: 30608 - protein, 38 aa, Artificial Sequence
  Quasi-synthetic sequence derived from human genome
KVAARMVWRLLHGQVLTRRERRRLLRTCVDFFRLVPFM

SEQ ID NO: 30609 - protein, 38 aa, Artificial Sequence
  Quasi-synthetic sequence derived from human genome
PNTALLSLVLMAGTFFIAFFLRKFKNSRFFPGRIRRVI

SEQ ID NO: 30610 - protein, 38 aa, Artificial Sequence
  Quasi-synthetic sequence derived from human genome
MVLKTLTKPVTLSRSKINKTKVLKMIFVHLIIFCFCFV

SEQ ID NO: 30611 - protein, 38 aa, Artificial Sequence
  Quasi-synthetic sequence derived from human genome
PGMLWLMERGGLGKPRGPRHRGLLRVRLGRFISRLLLW

SEQ ID NO: 30612 - protein, 38 aa, Artificial Sequence
  Quasi-synthetic sequence derived from human genome
RRIVVSRGRLRRLLWIGFTLTAVALILWQCALLVFSFY

SEQ ID NO: 30613 - protein, 38 aa, Artificial Sequence
  Quasi-synthetic sequence derived from human genome
RKLLMLKKEKLEKVQNKAASLIQAMWRRYRAKKYLCKV

SEQ ID NO: 30614 - protein, 38 aa, Artificial Sequence
  Quasi-synthetic sequence derived from human genome
RVIHDGARLFRIKCVTRIQAYWRGCVVRKWYRNLRKTV

SEQ ID NO: 30615 - protein, 38 aa, Artificial Sequence
  Quasi-synthetic sequence derived from human genome
RGRALGGRAVRSRRAIAVLSRWPAFPAFRAFLTFLYRY

SEQ ID NO: 30616 - protein, 38 aa, Artificial Sequence
  Quasi-synthetic sequence derived from human genome
KQNIFYFLYGKTRSRIPLVRNRRFQLCRCMNPRARKNR

SEQ ID NO: 30617 - protein, 38 aa, Artificial Sequence
  Quasi-synthetic sequence derived from human genome
RREYVKKRQAAIKLEAHWRGALARKAIQRRKWAVRIIR

SEQ ID NO: 30618 - protein, 38 aa, Artificial Sequence
  Quasi-synthetic sequence derived from human genome
WIYNKTKMAFLLVGICFLCKLCTIIFTTIAFFIYKRRL

SEQ ID NO: 30619 - protein, 38 aa, Artificial Sequence
  Quasi-synthetic sequence derived from human genome
LFMQSIATISLFLNILEIFHLGFKKIKRGLWGKYKLKK

SEQ ID NO: 30620 - protein, 38 aa, Artificial Sequence
  Quasi-synthetic sequence derived from human genome
MASAGGAKILGVLRVLRLLRTLRPLRVISRAPGLKLVV

SEQ ID NO: 30621 - protein, 38 aa, Artificial Sequence
  Quasi-synthetic sequence derived from human genome
RRARGRWEGSAPRRLLLALHRRLRGLRRAAAGTSRLLF

SEQ ID NO: 30622 - protein, 38 aa, Artificial Sequence
  Quasi-synthetic sequence derived from human genome
IAVAVLITGYIQICFWVIAAARQIQKMRKFYFRRIMRM

SEQ ID NO: 30623 - protein, 38 aa, Artificial Sequence
  Quasi-synthetic sequence derived from human genome
IYRFLRTRNLIAPIFLHRTLTYMSHRNSRTNIKRKTFK

SEQ ID NO: 30624 - protein, 38 aa, Artificial Sequence
  Quasi-synthetic sequence derived from human genome
KLRLDKLRQSCVMVQKHMRGWLQRKKFLRERRAALIIQ

SEQ ID NO: 30625 - protein, 38 aa, Artificial Sequence
  Quasi-synthetic sequence derived from human genome
ALASCTRCLNKIMKTRVCRRLRRANRVLRARCRRAVKS

SEQ ID NO: 30626 - protein, 38 aa, Artificial Sequence
  Quasi-synthetic sequence derived from human genome
LHIFPRLARHDRGNYVRLNMKQKHYVRGRALRSRLLRK

SEQ ID NO: 30627 - protein, 38 aa, Artificial Sequence
  Quasi-synthetic sequence derived from human genome
KQNIFHFLYRKNRSRIPLLRKPWFQLGHSMNPRARKNR

SEQ ID NO: 30628 - protein, 38 aa, Artificial Sequence
  Quasi-synthetic sequence derived from human genome
YLHILFSLYTRTLYLRYRPKVKFLFGIWPVILFEPLRK

SEQ ID NO: 30629 - protein, 38 aa, Artificial Sequence
  Quasi-synthetic sequence derived from human genome
RHKKAYVVCTFVFGYLLPLLLICFCYAKVLNHLHKKLK

SEQ ID NO: 30630 - protein, 38 aa, Artificial Sequence
  Quasi-synthetic sequence derived from human genome
LKRIRKIKNVTNQIALLKLGKLPLLYKVGPVNVIQWFG

SEQ ID NO: 30631 - protein, 38 aa, Artificial Sequence
  Quasi-synthetic sequence derived from human genome
LAKKIKIFFALAPVVTVKYTQSPMKKLTTLSRRVVKVL

SEQ ID NO: 30632 - protein, 38 aa, Artificial Sequence
  Quasi-synthetic sequence derived from human genome
LSRVSKKNIFLLFKKLCSFRYRRDLLRLSYGEAKKAAR

SEQ ID NO: 30633 - protein, 38 aa, Artificial Sequence
  Quasi-synthetic sequence derived from human genome
KRLHKVLRPFLLRRVKVDVEKQMPKKYEHVIRCRLSKR

SEQ ID NO: 30634 - protein, 38 aa, Artificial Sequence
  Quasi-synthetic sequence derived from human genome
WSRIKKILKEGPMLKNCNSFKRWKLRYFLVQGQKLYFA

SEQ ID NO: 30635 - protein, 38 aa, Artificial Sequence
  Quasi-synthetic sequence derived from human genome
LLAILLVVAVFCILWNWNKRKKRQVPYLRVTVMPLLTL

SEQ ID NO: 30636 - protein, 38 aa, Artificial Sequence
  Quasi-synthetic sequence derived from human genome
LFRKPQRSFFGKLLREFRLVAADRRSWKILLFGVINLI

SEQ ID NO: 30637 - protein, 38 aa, Artificial Sequence
  Quasi-synthetic sequence derived from human genome
MKRKKRVHFHGFMLDVHKRIHRLKQSLPKRKPGFMAKS

SEQ ID NO: 30638 - protein, 38 aa, Artificial Sequence
  Quasi-synthetic sequence derived from human genome
LFNKYISRPRRVELAVMLNLTERHIKIWFQNRRMKWKK

SEQ ID NO: 30639 - protein, 38 aa, Artificial Sequence
  Quasi-synthetic sequence derived from human genome
KMVKKIAMREIKLLKQLRHENLVNLLEVCKKKKRWYLV

SEQ ID NO: 30640 - protein, 38 aa, Artificial Sequence
  Quasi-synthetic sequence derived from human genome
RKRLRCRRKTVLVLMCILTAYVLCWAPFYGFTIVRDFF

SEQ ID NO: 30641 - protein, 38 aa, Artificial Sequence
  Quasi-synthetic sequence derived from human genome
MALKEGLRAWKRIFWRQILLTLGLLGLFLYGLPKFRHL

SEQ ID NO: 30642 - protein, 38 aa, Artificial Sequence
  Quasi-synthetic sequence derived from human genome
RRRCCRLCIWLLQTLVHLLQLGQVWRYLRALYLGLQSR

SEQ ID NO: 30643 - protein, 38 aa, Artificial Sequence
  Quasi-synthetic sequence derived from human genome
KLKYLAFLRKRMNTNPSRGPYHFRAPSRIFWRTVRGML

SEQ ID NO: 30644 - protein, 38 aa, Artificial Sequence
  Quasi-synthetic sequence derived from human genome
SKPMRWPFFLFIPFFIIFCVLIAIMVKVNFQRKKWRTE

SEQ ID NO: 30645 - protein, 38 aa, Artificial Sequence
  Quasi-synthetic sequence derived from human genome
KPRVTNIFPKQKYLSKKTTKRKRGYIKNKLVFKKGKKI

SEQ ID NO: 30646 - protein, 38 aa, Artificial Sequence
  Quasi-synthetic sequence derived from human genome
AVVLLLLLLLLLFLILRHRRQGKHWTSSPAQLPTPRKK

SEQ ID NO: 30647 - protein, 38 aa, Artificial Sequence
  Quasi-synthetic sequence derived from human genome
RLRFGPRRALAALVRRGWRCGYLECSAKYNWHVLRLFR

SEQ ID NO: 30648 - protein, 38 aa, Artificial Sequence
  Quasi-synthetic sequence derived from human genome
KRLNIRKVIPYIASQFRKDKIWLRRTKPSKRQYQICLA

SEQ ID NO: 30649 - protein, 38 aa, Artificial Sequence
  Quasi-synthetic sequence derived from human genome
RELGLFQGPALGLRNHLGRKLRRRKKKKAKRTTNWKII

SEQ ID NO: 30650 - protein, 38 aa, Artificial Sequence
  Quasi-synthetic sequence derived from human genome
FKCLLLTGGCTLLHCFVILPVFLTFFPPSKKHHKKKKR

SEQ ID NO: 30651 - protein, 38 aa, Artificial Sequence
  Quasi-synthetic sequence derived from human genome
RRSRWPFSKARSFCKTHASLFKKILLGLLCLAYAAYLL

SEQ ID NO: 30652 - protein, 38 aa, Artificial Sequence
  Quasi-synthetic sequence derived from human genome
LARKAFAKKQQQLSALKVLQRNCAAYLKLRHWQWWRVF

SEQ ID NO: 30653 - protein, 38 aa, Artificial Sequence
  Quasi-synthetic sequence derived from human genome
LRILSKYHRFISFTLYLIGFCMFVLSLVKKHYRLQFYM

SEQ ID NO: 30654 - protein, 38 aa, Artificial Sequence
  Quasi-synthetic sequence derived from human genome
RNILGLVLPLLIMVICYSGILKTLLRCRNEKKRHRAVR

SEQ ID NO: 30655 - protein, 38 aa, Artificial Sequence
  Quasi-synthetic sequence derived from human genome
IIFRFLTRFFYAKKKASYSQISQKNLDFTILLRLKTLR

SEQ ID NO: 30656 - protein, 38 aa, Artificial Sequence
  Quasi-synthetic sequence derived from human genome
IRAVILHFFRGLLYWKNTLALAAILVLLRVRQCLSLRP

SEQ ID NO: 30657 - protein, 38 aa, Artificial Sequence
  Quasi-synthetic sequence derived from human genome
MAPWVKVVFLEKLPALLFMQQPRHHCARQRLRLRRRQR

SEQ ID NO: 30658 - protein, 38 aa, Artificial Sequence
  Quasi-synthetic sequence derived from human genome
MVRRTLLQAALRAWVIQCWWRSMQAKMLEQRRRLALRL

SEQ ID NO: 30659 - protein, 38 aa, Artificial Sequence
  Quasi-synthetic sequence derived from human genome
HLFQMPLFLKLFICFIFIRSSPTIVSNKRVSKRKFIPP

SEQ ID NO: 30660 - protein, 38 aa, Artificial Sequence
  Quasi-synthetic sequence derived from human genome
KKLPPVIIKYIIINRFRGRKNMLVKLGKIDSKEKQVIL

SEQ ID NO: 30661 - protein, 38 aa, Artificial Sequence
  Quasi-synthetic sequence derived from human genome
VRGWMARRHFQRLRDAAIVIQCAFRMLKARRELKALRI

SEQ ID NO: 30662 - protein, 38 aa, Artificial Sequence
  Quasi-synthetic sequence derived from human genome
KFMVLLWKNFILKRRRCIALVVEMVLTFLFSAALLATR

SEQ ID NO: 30663 - protein, 38 aa, Artificial Sequence
  Quasi-synthetic sequence derived from human genome
LRYYYNKRILHKTKGKRFTYKFNFSKLIVVNYPLWEVR

SEQ ID NO: 30664 - protein, 38 aa, Artificial Sequence
  Quasi-synthetic sequence derived from human genome
VLAGIVATICFLAAAILFSTLAACFVNKQRKRKLKRKK

SEQ ID NO: 30665 - protein, 38 aa, Artificial Sequence
  Quasi-synthetic sequence derived from human genome
RCCVRALSIQRLWYFWFLLMMGVLFCCGAGFFIRRRMY

SEQ ID NO: 30666 - protein, 38 aa, Artificial Sequence
  Quasi-synthetic sequence derived from human genome
KYIQMQLTLLVGNHTQRTAILGLWKIARKWMRRKMGKW

SEQ ID NO: 30667 - protein, 38 aa, Artificial Sequence
  Quasi-synthetic sequence derived from human genome
WKFFIDRIRRQLKVTLCFSPVGNKLRVRSRKFPAIVNC

SEQ ID NO: 30668 - protein, 38 aa, Artificial Sequence
  Quasi-synthetic sequence derived from human genome
ILVWKNWLGVKRQPLWTLVLILWPVIIFIILAITRTKF

SEQ ID NO: 30669 - protein, 38 aa, Artificial Sequence
  Quasi-synthetic sequence derived from human genome
FRWMRLRIRRMADAWIQAIKSLAEKQNLEKRKRKKVLV

SEQ ID NO: 30670 - protein, 38 aa, Artificial Sequence
  Quasi-synthetic sequence derived from human genome
VLAPWPRPPPRRFSPPRRMLPPPPMWRRSPPRMRRRSR

SEQ ID NO: 30671 - protein, 38 aa, Artificial Sequence
  Quasi-synthetic sequence derived from human genome
VRIRGTRMYQPLTEDEIRIFKRKKRIKRRALLFLSYIL

SEQ ID NO: 30672 - protein, 38 aa, Artificial Sequence
  Quasi-synthetic sequence derived from human genome
RSSRQSSFIAVGILGVVLLAIFVALFFLTKKRRQRQRL

SEQ ID NO: 30673 - protein, 38 aa, Artificial Sequence
  Quasi-synthetic sequence derived from human genome
RSLKPMQTRVVGRLQKPCFFFHWLKLFAIPILLIAVFL

SEQ ID NO: 30674 - protein, 38 aa, Artificial Sequence
  Quasi-synthetic sequence derived from human genome
RLLFRIGYSLYTRTWLGYLFYRQQLRRARNRYPKGHSK

SEQ ID NO: 30675 - protein, 38 aa, Artificial Sequence
  Quasi-synthetic sequence derived from human genome
LLKKLGIKLQVLINLGLVYKVQQHNGIIFQFVAFIKRR

SEQ ID NO: 30676 - protein, 38 aa, Artificial Sequence
  Quasi-synthetic sequence derived from human genome
RSHLIKATVIPNRVKMLPYFGIIRNRMMSTHKSKKKIR

SEQ ID NO: 30677 - protein, 38 aa, Artificial Sequence
  Quasi-synthetic sequence derived from human genome
RYFRIQEVLKHARHFRGRKNRCYRLAVRTVIRAFVKCT

SEQ ID NO: 30678 - protein, 38 aa, Artificial Sequence
  Quasi-synthetic sequence derived from human genome
LLLILRGQTRHQVRKGVAVRARPWRKNLQEVFGKRWLL

SEQ ID NO: 30679 - protein, 38 aa, Artificial Sequence
  Quasi-synthetic sequence derived from human genome
ILGVLRVLRLLRTLRPLRVISRAPGLKLVVETLISSLK

SEQ ID NO: 30680 - protein, 38 aa, Artificial Sequence
  Quasi-synthetic sequence derived from human genome
KIKKLRAGKLSPLKSKFKTGKLQIGRKGVQIVRRRGRP

SEQ ID NO: 30681 - protein, 38 aa, Artificial Sequence
  Quasi-synthetic sequence derived from human genome
LKLLKSHRVLKWKADKSLSYNSRFWKNLLYLMPAKTVK

SEQ ID NO: 30682 - protein, 38 aa, Artificial Sequence
  Quasi-synthetic sequence derived from human genome
RFLLKRGLRNKRIGHFLFWFLRSEIAQSRHYQQRFAVI

SEQ ID NO: 30683 - protein, 38 aa, Artificial Sequence
  Quasi-synthetic sequence derived from human genome
WRKTVCHNGVLGLSRLLFFLLGFLRIRVRGQRASRLQA

SEQ ID NO: 30684 - protein, 38 aa, Artificial Sequence
  Quasi-synthetic sequence derived from human genome
VTLGLLVAGVLVLLVSLGVAMHLCCRRRRARLRFMKQF

SEQ ID NO: 30685 - protein, 38 aa, Artificial Sequence
  Quasi-synthetic sequence derived from human genome
LGLVLPLLVMVICYSGILKTLLRCRNEKKRHRAVRLIF

SEQ ID NO: 30686 - protein, 38 aa, Artificial Sequence
  Quasi-synthetic sequence derived from human genome
LARKAFAKRQQQLTAMKVLQRNCAAYLKLRNWQWWRLF

SEQ ID NO: 30687 - protein, 38 aa, Artificial Sequence
  Quasi-synthetic sequence derived from human genome
KILTRGERLDGFGLLLKKIMAILIKRFHHTRRNWKGLI

SEQ ID NO: 30688 - protein, 38 aa, Artificial Sequence
  Quasi-synthetic sequence derived from human genome
MRKHLSWWWLATVCMLLFSHLSAVQTRGIKHRIKWNRK

SEQ ID NO: 30689 - protein, 38 aa, Artificial Sequence
  Quasi-synthetic sequence derived from human genome
KFLLAFLVPLAIIASSHAAVSLRLQHRGRRRPGRFVRL

SEQ ID NO: 30690 - protein, 38 aa, Artificial Sequence
  Quasi-synthetic sequence derived from human genome
RYVAYFAQVKHLYNWNLPPRRILFIKHFIIYSIPRYVR

SEQ ID NO: 30691 - protein, 38 aa, Artificial Sequence
  Quasi-synthetic sequence derived from human genome
HFNRYLTRRRRIEIAHALCLTERQIKIWFQNRRMKWKK

SEQ ID NO: 30692 - protein, 38 aa, Artificial Sequence
  Quasi-synthetic sequence derived from human genome
VAFAFSGSKGKDINTIKSLRVLRVLRPLKTIKRLPKLK

SEQ ID NO: 30693 - protein, 38 aa, Artificial Sequence
  Quasi-synthetic sequence derived from human genome
VSTWLAIILLIFISLFPEILLIVLKNVRRRSARVTKRL

SEQ ID NO: 30694 - protein, 38 aa, Artificial Sequence
  Quasi-synthetic sequence derived from human genome
RKCFAISLLVICIIISIGIFYGFVANHQVRTRIKRSRK

SEQ ID NO: 30695 - protein, 38 aa, Artificial Sequence
  Quasi-synthetic sequence derived from human genome
FLRRPGAPASWIWWRMLRQVLRRGLQSFCHRLGLCVSR

SEQ ID NO: 30696 - protein, 38 aa, Artificial Sequence
  Quasi-synthetic sequence derived from human genome
KKLVPVRRRAWGQLCLPPQRLRVTRHPLIPAPVLGLLL

SEQ ID NO: 30697 - protein, 38 aa, Artificial Sequence
  Quasi-synthetic sequence derived from human genome
RSNAPNIPKLNRFLLLFIGFVCVLLSFFMARVFMRMKL

SEQ ID NO: 30698 - protein, 38 aa, Artificial Sequence
  Quasi-synthetic sequence derived from human genome
CYALCNKAFRDTFRLLLLCRWDKRRWRKIPKRPGSVHR

SEQ ID NO: 30699 - protein, 38 aa, Artificial Sequence
  Quasi-synthetic sequence derived from human genome
SGLLTVMVWVSSIFFFLPVFCLTVLYSLIGRKLWRRRR

SEQ ID NO: 30700 - protein, 38 aa, Artificial Sequence
  Quasi-synthetic sequence derived from human genome
RFKHLKKLLLVHGHWCYSRLARMVVYYLYKNVCYVNLL

SEQ ID NO: 30701 - protein, 38 aa, Artificial Sequence
  Quasi-synthetic sequence derived from human genome
FLLSRKILRLITIRKLFTAIGVLFPSVILVSLPWVRSS

SEQ ID NO: 30702 - protein, 38 aa, Artificial Sequence
  Quasi-synthetic sequence derived from human genome
ILFRATRKPLSGRTPRLVYKWFLLIYKLSYAFGVVGYL

SEQ ID NO: 30703 - protein, 38 aa, Artificial Sequence
  Quasi-synthetic sequence derived from human genome
IVKQGYVRIRSRRLGIYQRCWLVFKKASSKGPKRLEKF

SEQ ID NO: 30704 - protein, 38 aa, Artificial Sequence
  Quasi-synthetic sequence derived from human genome
VIWAVIKPGTSFGISVLRALRLLRIFKVTKYWASLRNL

SEQ ID NO: 30705 - protein, 38 aa, Artificial Sequence
  Quasi-synthetic sequence derived from human genome
LYLLRGRKTFLIPVLFNNYITAALKLLEKLYKVNLKVK

SEQ ID NO: 30706 - protein, 38 aa, Artificial Sequence
  Quasi-synthetic sequence derived from human genome
RRPRGSTARTLLRLLLRLLLFLGLLALALHFLGLQPLH

SEQ ID NO: 30707 - protein, 38 aa, Artificial Sequence
  Quasi-synthetic sequence derived from human genome
ALSVERYLAICRPLRARVLVTRRRVRALIAVLWAVALL

SEQ ID NO: 30708 - protein, 38 aa, Artificial Sequence
  Quasi-synthetic sequence derived from human genome
IRKSGFGGITMLFTGYFVLCCSWSFRRLKKLCRPLPWK

SEQ ID NO: 30709 - protein, 38 aa, Artificial Sequence
  Quasi-synthetic sequence derived from human genome
RRELKRLKEEARRKHAVAVIWAYWLGLKVRREYRKFFR

SEQ ID NO: 30710 - protein, 38 aa, Artificial Sequence
  Quasi-synthetic sequence derived from human genome
LKHTIKLLTVIKWHGPKCNKLNSKFWKRLQYEMPFKRI

SEQ ID NO: 30711 - protein, 38 aa, Artificial Sequence
  Quasi-synthetic sequence derived from human genome
LMASMARRASRGPIAFWARRASRTRLAAWARRALLSLR

SEQ ID NO: 30712 - protein, 38 aa, Artificial Sequence
  Quasi-synthetic sequence derived from human genome
HIKNYIMNKDLLRRVLVLMNSKHTFLALCALRFMRRII

SEQ ID NO: 30713 - protein, 38 aa, Artificial Sequence
  Quasi-synthetic sequence derived from human genome
FYFLKIANFSNSIFLYLKWRVKKVVLVLLLVTSVFLFL

SEQ ID NO: 30714 - protein, 38 aa, Artificial Sequence
  Quasi-synthetic sequence derived from human genome
YLVSGIRTPPVRRNSKLATLGRIFKPWKWRKKKNEKLK

SEQ ID NO: 30715 - protein, 38 aa, Artificial Sequence
  Quasi-synthetic sequence derived from human genome
FPVSWRTRMRAFHLSLPGGAQLLTYLVKVLKRRTWRRN

SEQ ID NO: 30716 - protein, 38 aa, Artificial Sequence
  Quasi-synthetic sequence derived from human genome
ILATLGVALLFIVRKKRKEKRLKRLRDAKSLAEMLISK

SEQ ID NO: 30717 - protein, 38 aa, Artificial Sequence
  Quasi-synthetic sequence derived from human genome
GEGKMCICFSFCLWFVLQVLIVVLRIVRYRKSSKLIKK

SEQ ID NO: 30718 - protein, 38 aa, Artificial Sequence
  Quasi-synthetic sequence derived from human genome
LRFYPASPRRLHRASTPGPAWGWLLRRRRWAALLVLGL

SEQ ID NO: 30719 - protein, 38 aa, Artificial Sequence
  Quasi-synthetic sequence derived from human genome
IKLYWWRFLSMWGMFSVITSYILFRATRKPLSGRTPRL

SEQ ID NO: 30720 - protein, 38 aa, Artificial Sequence
  Quasi-synthetic sequence derived from human genome
FRQRIILRVWWSTWRQRLGQVRVSRALHASALKHRALS

SEQ ID NO: 30721 - protein, 38 aa, Artificial Sequence
  Quasi-synthetic sequence derived from human genome
LTAGVITMPQYLRKRFGGRRIRLYLSVLSLFLYIFTKI

SEQ ID NO: 30722 - protein, 38 aa, Artificial Sequence
  Quasi-synthetic sequence derived from human genome
KLRRNIVKLSLYRHFTNTLILAVAASIVFIIWTTMKFR

SEQ ID NO: 30723 - protein, 38 aa, Artificial Sequence
  Quasi-synthetic sequence derived from human genome
KNLSLLKLLKSSNRRIQELHKLAKRCWHSLLSVPKILR

SEQ ID NO: 30724 - protein, 38 aa, Artificial Sequence
  Quasi-synthetic sequence derived from human genome
LRLKRRVKSVILVVLLGPLLFLACHLFVVNMNQIVWTK

SEQ ID NO: 30725 - protein, 38 aa, Artificial Sequence
  Quasi-synthetic sequence derived from human genome
ILRQDMTPGGGPGARRRQRGRLMRRLVRRLRRWGLLPR

SEQ ID NO: 30726 - protein, 38 aa, Artificial Sequence
  Quasi-synthetic sequence derived from human genome
VRRILQRVPGKQRFGIYRFLPFFFVLGGTMEWIMIKVR

SEQ ID NO: 30727 - protein, 38 aa, Artificial Sequence
  Quasi-synthetic sequence derived from human genome
VPRPRGKLAGLLRTFMRSRPSRQRLRQRGILRQRVFGC

SEQ ID NO: 30728 - protein, 38 aa, Artificial Sequence
  Quasi-synthetic sequence derived from human genome
RRFREMKPRVLQRWSRQILRGLHFLHSRVPPILHRDLK

SEQ ID NO: 30729 - protein, 38 aa, Artificial Sequence
  Quasi-synthetic sequence derived from human genome
RVVHLFMSYVYLLVPPLMNPIIYSIKTKQIRQRIIKKF

SEQ ID NO: 30730 - protein, 38 aa, Artificial Sequence
  Quasi-synthetic sequence derived from human genome
LKWKRYGRPYFCMLGAIYLLYIICFTMCCIYRPLKPRT

SEQ ID NO: 30731 - protein, 38 aa, Artificial Sequence
  Quasi-synthetic sequence derived from human genome
FNALRRALRHDLGGKRLSKIATLRRAIHRIAALSLVLR

SEQ ID NO: 30732 - protein, 38 aa, Artificial Sequence
  Quasi-synthetic sequence derived from human genome
LARKAFAKRQQQLTAMKVIQRNCAAYLKLRNWQWWRLF

SEQ ID NO: 30733 - protein, 38 aa, Artificial Sequence
  Quasi-synthetic sequence derived from human genome
RLRPRLHFCLVLLLLLVVPAAWGCGPGRVVGSRRRPPR

SEQ ID NO: 30734 - protein, 38 aa, Artificial Sequence
  Quasi-synthetic sequence derived from human genome
IVNFSRLIFHHLKRKAKSVVLVIVLGSLFFLVCHLVMK

SEQ ID NO: 30735 - protein, 38 aa, Artificial Sequence
  Quasi-synthetic sequence derived from human genome
TVFLLAILGGMAFILLVLLCLLLYYCRRKCLKPRQHHR

SEQ ID NO: 30736 - protein, 38 aa, Artificial Sequence
  Quasi-synthetic sequence derived from human genome
AKALKAKKAVLKGVHSHKKKKIRTSPTFRRPKTLRLRR

SEQ ID NO: 30737 - protein, 38 aa, Artificial Sequence
  Quasi-synthetic sequence derived from human genome
AFFIRCGIFLILEKLKIITYRNLFKKVYLLLKTHQLSL

SEQ ID NO: 30738 - protein, 38 aa, Artificial Sequence
  Quasi-synthetic sequence derived from human genome
IKRFLAKKQKQNRPIPQWIQMKPGSKIRYNSKRRHWRR

SEQ ID NO: 30739 - protein, 38 aa, Artificial Sequence
  Quasi-synthetic sequence derived from human genome
RIMRVLRIARVLKLLKMAVGMRALLDTVGNLGLLFMLL

SEQ ID NO: 30740 - protein, 38 aa, Artificial Sequence
  Quasi-synthetic sequence derived from human genome
WTSLTRKGIVRVVFFPFFFRWWLQVTSKVIFFWLLVLY

SEQ ID NO: 30741 - protein, 38 aa, Artificial Sequence
  Quasi-synthetic sequence derived from human genome
RRCHCLPFPKRGMQRWMLPLRRGARLLPLASSKNPRAR

SEQ ID NO: 30742 - protein, 38 aa, Artificial Sequence
  Quasi-synthetic sequence derived from human genome
QVPIWIIVGSTLGGLLLLALLVLALWKLGFFRSARRRR

SEQ ID NO: 30743 - protein, 38 aa, Artificial Sequence
  Quasi-synthetic sequence derived from human genome
MVRMVRAATLIQALWKGYLVRSLLRSKKKRGKGKAKDK

SEQ ID NO: 30744 - protein, 38 aa, Artificial Sequence
  Quasi-synthetic sequence derived from human genome
RRHYYLLRQFKIFSDFRMNKAFVTWKLNVKRIKTEKSR

SEQ ID NO: 30745 - protein, 38 aa, Artificial Sequence
  Quasi-synthetic sequence derived from human genome
TILKKGKRENIVNIRKQREKAAILIQAVWKGFILRKKL

SEQ ID NO: 30746 - protein, 38 aa, Artificial Sequence
  Quasi-synthetic sequence derived from human genome
GFVVYLKRKTLIRLLFTNKKTTIEKLRCVRPSRPPRGF

SEQ ID NO: 30747 - protein, 38 aa, Artificial Sequence
  Quasi-synthetic sequence derived from human genome
LMAHPFLLLILLCMSLLLFQVIRLYQRRRWTIRAMHLF

SEQ ID NO: 30748 - protein, 38 aa, Artificial Sequence
  Quasi-synthetic sequence derived from human genome
FLWHTYRWLLLKLLLLLLLLLLLALFLYSVPGYLVKKI

SEQ ID NO: 30749 - protein, 38 aa, Artificial Sequence
  Quasi-synthetic sequence derived from human genome
PRVQVGVGSHAAAKRWLGRWRRKRRWRRVRKAGPRDLL

SEQ ID NO: 30750 - protein, 38 aa, Artificial Sequence
  Quasi-synthetic sequence derived from human genome
ILKGKKCIVLVTELMTSGTLKTYLKRFKVMKPKVLRSW

SEQ ID NO: 30751 - protein, 38 aa, Artificial Sequence
  Quasi-synthetic sequence derived from human genome
KPRLNQLYERALKLLPCSYKLWYRYLKARRAQVKHRCV

SEQ ID NO: 30752 - protein, 38 aa, Artificial Sequence
  Quasi-synthetic sequence derived from human genome
LKLRSWPLTVLYYLLPFGALRPLSRVGWRPVSRVALYK

SEQ ID NO: 30753 - protein, 38 aa, Artificial Sequence
  Quasi-synthetic sequence derived from human genome
LRFKRTHIKMKKQPKGYGLRCHRAIITICRLIGIKDMY

SEQ ID NO: 30754 - protein, 38 aa, Artificial Sequence
  Quasi-synthetic sequence derived from human genome
RHKLKEVRLFLKNYSKTRFGYRIKWRIICGNNSTVIFF

SEQ ID NO: 30755 - protein, 38 aa, Artificial Sequence
  Quasi-synthetic sequence derived from human genome
FYVTVLAFTLIVLTGGFTWLCICCCKRQKRTKIRKKTK

SEQ ID NO: 30756 - protein, 38 aa, Artificial Sequence
  Quasi-synthetic sequence derived from human genome
KYVKLARSLRTYGVSFFLVKEKMKGKNKLVPRLLGITK

SEQ ID NO: 30757 - protein, 38 aa, Artificial Sequence
  Quasi-synthetic sequence derived from human genome
LFQWVYQRRGLVHLCCSKLVNYLTPIKYLRKSLKIIYL

SEQ ID NO: 30758 - protein, 38 aa, Artificial Sequence
  Quasi-synthetic sequence derived from human genome
LLPLLLLKLHLWPQLRWLPADLAFAVRALCCKRALRAR

SEQ ID NO: 30759 - protein, 38 aa, Artificial Sequence
  Quasi-synthetic sequence derived from human genome
SARISSAFFRLFRVMRLIKLLSRAEGVRTLLWTFIKSF

SEQ ID NO: 30760 - protein, 38 aa, Artificial Sequence
  Quasi-synthetic sequence derived from human genome
YISVKVMLKSIKTRLGRRVPAAPPALRRNLLLQAWKCV

SEQ ID NO: 30761 - protein, 38 aa, Artificial Sequence
  Quasi-synthetic sequence derived from human genome
LCYLLIVVKVRAAGVRVGCVRRRSERKVTRMVLVVVLV

SEQ ID NO: 30762 - protein, 38 aa, Artificial Sequence
  Quasi-synthetic sequence derived from human genome
LRCLRPLRIFKLVPQMRKVVRELFSGFKEIFLVSILLL

SEQ ID NO: 30763 - protein, 38 aa, Artificial Sequence
  Quasi-synthetic sequence derived from human genome
LCLRLLLFFRFKRTLDRICVLFLLGWHRKPRSDGSLFI

SEQ ID NO: 30764 - protein, 38 aa, Artificial Sequence
  Quasi-synthetic sequence derived from human genome
FFILTGLLVCLACLAKCVRFSRCVLLNYWKVLPKSFLR

SEQ ID NO: 30765 - protein, 38 aa, Artificial Sequence
  Quasi-synthetic sequence derived from human genome
RSLLTLRLSKNRITQLPVRAFKLPRLTQLDLNRNRIRL

SEQ ID NO: 30766 - protein, 38 aa, Artificial Sequence
  Quasi-synthetic sequence derived from human genome
RKRALSRLKLKLNKDIVISVGIYNLVQKALKPPPIKLY

SEQ ID NO: 30767 - protein, 38 aa, Artificial Sequence
  Quasi-synthetic sequence derived from human genome
VLRMMRIFWVIKLARHFIGLQTLGLTLKRCYREMVMLL

SEQ ID NO: 30768 - protein, 38 aa, Artificial Sequence
  Quasi-synthetic sequence derived from human genome
FLLLVIKSSPSNYVRRELLRRTWGRERKVRGLQLRLLF

SEQ ID NO: 30769 - protein, 38 aa, Artificial Sequence
  Quasi-synthetic sequence derived from human genome
KRYFTIVIISSSLLLGLIVLLLISYVMWKAGFFKRQYK

SEQ ID NO: 30770 - protein, 38 aa, Artificial Sequence
  Quasi-synthetic sequence derived from human genome
RKARTVLKSTSKLMTQMRMGKKKRAMKGKKPSFMVIRF

SEQ ID NO: 30771 - protein, 38 aa, Artificial Sequence
  Quasi-synthetic sequence derived from human genome
FKIKQFLAKKQKQNRPIPQWIRMKTGNKIRYNSKRRHW

SEQ ID NO: 30772 - protein, 38 aa, Artificial Sequence
  Quasi-synthetic sequence derived from human genome
VIKLMFAGLFFLFFVRFGIGRQLLIKFPWFFSFGYFSK

SEQ ID NO: 30773 - protein, 38 aa, Artificial Sequence
  Quasi-synthetic sequence derived from human genome
KSKKICPLYWYKFAKTFLIWNCSPCWLKLKEFVHRIIM

SEQ ID NO: 30774 - protein, 38 aa, Artificial Sequence
  Quasi-synthetic sequence derived from human genome
ARWIVGKVIGTKMQKTAKVRVTRLVLDPYLLKYFNKRK

SEQ ID NO: 30775 - protein, 38 aa, Artificial Sequence
  Quasi-synthetic sequence derived from human genome
MFRKPYVRRRPSKRRGARAFRCIKPAPVIHPASVIFTV

SEQ ID NO: 30776 - protein, 38 aa, Artificial Sequence
  Quasi-synthetic sequence derived from human genome
RAVWSMMRYLRASSNRNFLLTMRPFLKRAILVLSYVLV

SEQ ID NO: 30777 - protein, 38 aa, Artificial Sequence
  Quasi-synthetic sequence derived from human genome
RRKELFRKKNKAAAVIQRAWRSYQLRKHLSHLRHMKQL

SEQ ID NO: 30778 - protein, 38 aa, Artificial Sequence
  Quasi-synthetic sequence derived from human genome
RPTPRRPRPRLARPRAGQKPWLLVIRSMERVMYVMLII

SEQ ID NO: 30779 - protein, 38 aa, Artificial Sequence
  Quasi-synthetic sequence derived from human genome
GMALLRLFRMLRIFKLGKYWPTFQILMWSLSNSWVALK

SEQ ID NO: 30780 - protein, 38 aa, Artificial Sequence
  Quasi-synthetic sequence derived from human genome
LRVIRLVRVFRIFKLSRHSKGLQILGQTLKASMRELGL

SEQ ID NO: 30781 - protein, 38 aa, Artificial Sequence
  Quasi-synthetic sequence derived from human genome
SRRRQAGRRLRYLPTGSFPFLLLLLLLCIQLGGGQKKK

SEQ ID NO: 30782 - protein, 38 aa, Artificial Sequence
  Quasi-synthetic sequence derived from human genome
RSFFIRMKSTLTKRGVHIKSSGYKVIHITGRLRLRVSL

SEQ ID NO: 30783 - protein, 38 aa, Artificial Sequence
  Quasi-synthetic sequence derived from human genome
SPITLGLLVAGVLVLLVSLGVAIHLCCRRRRARLRFMK

SEQ ID NO: 30784 - protein, 38 aa, Artificial Sequence
  Quasi-synthetic sequence derived from human genome
RMWGRLVGLVYILPAAYFWRKGWLSRGMKGRVLALCGL

SEQ ID NO: 30785 - protein, 38 aa, Artificial Sequence
  Quasi-synthetic sequence derived from human genome
IQRCYRKYKQLTWIALKFALYKKMTQAAILIQSKFRSY

SEQ ID NO: 30786 - protein, 38 aa, Artificial Sequence
  Quasi-synthetic sequence derived from human genome
FKKKAHKLTSAPLKQNFQKLLKLFYIKKLKPLYNYNSP

SEQ ID NO: 30787 - protein, 38 aa, Artificial Sequence
  Quasi-synthetic sequence derived from human genome
KRRMSVGQQTWALLCKNCLKKWRMKRQTLLEWLFSFLL

SEQ ID NO: 30788 - protein, 38 aa, Artificial Sequence
  Quasi-synthetic sequence derived from human genome
RLWGRRKCKPQMNYDKLSRALRYYYNKRILHKTKGKRF

SEQ ID NO: 30789 - protein, 38 aa, Artificial Sequence
  Quasi-synthetic sequence derived from human genome
YLLLLAFLQRRQRRRQDSRVVARSVRILVASFFLCWFP

SEQ ID NO: 30790 - protein, 38 aa, Artificial Sequence
  Quasi-synthetic sequence derived from human genome
LRVLRPLKTIKRLPKLKAVFDCVVNSLKNVLNILIVYM

SEQ ID NO: 30791 - protein, 38 aa, Artificial Sequence
  Quasi-synthetic sequence derived from human genome
QKTLKYLLLGRWRKKHLTFRILNLPSTLPPHTARAALR

SEQ ID NO: 30792 - protein, 38 aa, Artificial Sequence
  Quasi-synthetic sequence derived from human genome
AFRRLKAHNLCRQIRAACVIQSYWRMRQDRVRFLNLKK

SEQ ID NO: 30793 - protein, 38 aa, Artificial Sequence
  Quasi-synthetic sequence derived from human genome
LLPVHLLITIYSALIFIPWYFLTNAKKKNAMAKRIKAK

SEQ ID NO: 30794 - protein, 38 aa, Artificial Sequence
  Quasi-synthetic sequence derived from human genome
RRYFREATMKMAVMIFKRGVFESRRKNKAVFRPKIRIN

SEQ ID NO: 30795 - protein, 38 aa, Artificial Sequence
  Quasi-synthetic sequence derived from human genome
LFQWVYQRRGLVHLCCSKLVNYLTPIKYLRKSLKIIYI

SEQ ID NO: 30796 - protein, 38 aa, Artificial Sequence
  Quasi-synthetic sequence derived from human genome
QVYKVGIYGWRKRCLYFFVLLLMILILVNLAMTIWILK

SEQ ID NO: 30797 - protein, 38 aa, Artificial Sequence
  Quasi-synthetic sequence derived from human genome
ISVHRCLGVLRPLRSLRWGRARYARRVAGAVWVLVLAC

SEQ ID NO: 30798 - protein, 38 aa, Artificial Sequence
  Quasi-synthetic sequence derived from human genome
VLIRRIHKVDIPSIITKKLLKAAMKHIEVIVKARQKVK

SEQ ID NO: 30799 - protein, 38 aa, Artificial Sequence
  Quasi-synthetic sequence derived from human genome
RKQIFILLFQRLQNSKTTKFIKSFLVFINLYCIKYGAL

SEQ ID NO: 30800 - protein, 38 aa, Artificial Sequence
  Quasi-synthetic sequence derived from human genome
NRVAKMGLILAIRSILLVIPFPFTLRRLKYCQKNLLSH

SEQ ID NO: 30801 - protein, 38 aa, Artificial Sequence
  Quasi-synthetic sequence derived from human genome
LKLKVMDLRGKFKRPPLRRVRVSADAMLRALLGSKHKV

SEQ ID NO: 30802 - protein, 38 aa, Artificial Sequence
  Quasi-synthetic sequence derived from human genome
ARLLRAQSLEWFYNNVKSRFKRFGSAKVLKNLYRKHRL

SEQ ID NO: 30803 - protein, 38 aa, Artificial Sequence
  Quasi-synthetic sequence derived from human genome
LAVIGRMRTRLVRKRFLCLGWGLPALVVAVSVGFTRTK

SEQ ID NO: 30804 - protein, 38 aa, Artificial Sequence
  Quasi-synthetic sequence derived from human genome
ILNKLIKYIQIKFVRGSTFKEIPVTVYKPIIKKYTKII

SEQ ID NO: 30805 - protein, 38 aa, Artificial Sequence
  Quasi-synthetic sequence derived from human genome
RIARILAGSKKKICTKKPRFMSACAQLVIAFILICIQL

SEQ ID NO: 30806 - protein, 38 aa, Artificial Sequence
  Quasi-synthetic sequence derived from human genome
LPRKKLKHIRQGTNKGLIKKKLKNMLAAVVTKKKTHKY

SEQ ID NO: 30807 - protein, 38 aa, Artificial Sequence
  Quasi-synthetic sequence derived from human genome
FFPRRPRIHFRFPNRPFVPSRCNHRFPFQPFYWPHRYL

SEQ ID NO: 30808 - protein, 38 aa, Artificial Sequence
  Quasi-synthetic sequence derived from human genome
KSSFLLKFIRKMTSRHWCAVPILFLSKALANVPRHKAL

SEQ ID NO: 30809 - protein, 38 aa, Artificial Sequence
  Quasi-synthetic sequence derived from human genome
LDLLRQKLKKVFQQHYTNKIRALRNRLIVLLLECKRSR

SEQ ID NO: 30810 - protein, 38 aa, Artificial Sequence
  Quasi-synthetic sequence derived from human genome
RLHQFQQLLWVLGLLVGLLLLLLGLGACYTWRRRRVCK

SEQ ID NO: 30811 - protein, 38 aa, Artificial Sequence
  Quasi-synthetic sequence derived from human genome
MLLRKRYRHRPCRLQFLLLLLMLGCVLMMVAMLHPPHH

SEQ ID NO: 30812 - protein, 38 aa, Artificial Sequence
  Quasi-synthetic sequence derived from human genome
FRIIQTLFSCKNHKKAKAIKLILLVVIVFFLFWTPYNV

SEQ ID NO: 30813 - protein, 38 aa, Artificial Sequence
  Quasi-synthetic sequence derived from human genome
VMRRHCRTLRQRSRRPKMRPARRRGGRRQLLLRALDAV

SEQ ID NO: 30814 - protein, 38 aa, Artificial Sequence
  Quasi-synthetic sequence derived from human genome
PAKKKRKKGLRIKGKRRRKKLILAKKFSKDLGSGRPVA

SEQ ID NO: 30815 - protein, 38 aa, Artificial Sequence
  Quasi-synthetic sequence derived from human genome
LLRCRNEKKRHRAVRLIFTIMIVYFLFWAPYNIVLLLN

SEQ ID NO: 30816 - protein, 38 aa, Artificial Sequence
  Quasi-synthetic sequence derived from human genome
KQRLLFAKLFGHLTSARRARKSEVPHFRLKKVQNIKMW

SEQ ID NO: 30817 - protein, 38 aa, Artificial Sequence
  Quasi-synthetic sequence derived from human genome
KLFARKMKILGTIQILFGIMTFSFGVIFLFTLLKPYPR

SEQ ID NO: 30818 - protein, 38 aa, Artificial Sequence
  Quasi-synthetic sequence derived from human genome
KLNLFGLVLPLLVMIICYTGIIKILLRRPNEKKSKAVR

SEQ ID NO: 30819 - protein, 38 aa, Artificial Sequence
  Quasi-synthetic sequence derived from human genome
WKFFIEKVRRQLKVILCFSPVGSVLRVRARKFPAVVNC

SEQ ID NO: 30820 - protein, 38 aa, Artificial Sequence
  Quasi-synthetic sequence derived from human genome
FKATKFLNLNLRYSFLKTASFFVRLGPMALAFKVRGLL

SEQ ID NO: 30821 - protein, 38 aa, Artificial Sequence
  Quasi-synthetic sequence derived from human genome
WLRRRRARGIPPGPTPWPLVGNFGHVLLPPFLRRRSWL

SEQ ID NO: 30822 - protein, 38 aa, Artificial Sequence
  Quasi-synthetic sequence derived from human genome
WICQICRPRKKGRKLLQKKAAQIKRRYTNPIGRPKNRL

SEQ ID NO: 30823 - protein, 38 aa, Artificial Sequence
  Quasi-synthetic sequence derived from human genome
TSAAKLKRKYWWKNCKMWAIGITVLVIFIIIIIVWVVS

SEQ ID NO: 30824 - protein, 38 aa, Artificial Sequence
  Quasi-synthetic sequence derived from human genome
LLLWKNYTLQKRKVLVTVLELFLPLLFSGILIWLRLKI

SEQ ID NO: 30825 - protein, 38 aa, Artificial Sequence
  Quasi-synthetic sequence derived from human genome
ATFWRNKKSNKVLPMRRVLRKRPSPAPRTIRIEWLKSK

SEQ ID NO: 30826 - protein, 38 aa, Artificial Sequence
  Quasi-synthetic sequence derived from human genome
RLWKVLALVFGFATCATLFFILRKQYLQRQERLRLKQM

SEQ ID NO: 30827 - protein, 38 aa, Artificial Sequence
  Quasi-synthetic sequence derived from human genome
KKKIFVFLEHQTKVLKKRHTKEKVLRRAKRRWAPIPCS

SEQ ID NO: 30828 - protein, 38 aa, Artificial Sequence
  Quasi-synthetic sequence derived from human genome
AGATIGASILLIFFFIALVFFLYRRRKGSRKDVTLRKL

SEQ ID NO: 30829 - protein, 38 aa, Artificial Sequence
  Quasi-synthetic sequence derived from human genome
APRRGRLARCWARCRDWRRMALVSALLLMLFCVALWPV

SEQ ID NO: 30830 - protein, 38 aa, Artificial Sequence
  Quasi-synthetic sequence derived from human genome
RLLRVLKLVRFMPALRRQLVVLMKTMDNVATFCMLLML

SEQ ID NO: 30831 - protein, 38 aa, Artificial Sequence
  Quasi-synthetic sequence derived from human genome
KAIRFSYPSIHPFILIWGNKKLKQTFLSVFWQMRYWVK

SEQ ID NO: 30832 - protein, 38 aa, Artificial Sequence
  Quasi-synthetic sequence derived from human genome
RLLSRVQPRAPCLRRLWGRGARPEVAGRRRAWAWGWRR

SEQ ID NO: 30833 - protein, 38 aa, Artificial Sequence
  Quasi-synthetic sequence derived from human genome
DPKQNIFYFLYGKTRSRIPLLRKRRFQLCRCMNPRARK

SEQ ID NO: 30834 - protein, 38 aa, Artificial Sequence
  Quasi-synthetic sequence derived from human genome
TGAVLPLALGLAITALLLLMVACRLRLVKQKLKKARPI

SEQ ID NO: 30835 - protein, 38 aa, Artificial Sequence
  Quasi-synthetic sequence derived from human genome
ICTRYKWLIIKIVLALLGLLMLGLFLYSLPGYMVKKLL

SEQ ID NO: 30836 - protein, 38 aa, Artificial Sequence
  Quasi-synthetic sequence derived from human genome
PLLKSFLQERLGIHLIRRKIVKPKHHVLMSRKESWKVK

SEQ ID NO: 30837 - protein, 38 aa, Artificial Sequence
  Quasi-synthetic sequence derived from human genome
YNPLFIPVAVMVTAFSGLAFIIWLARRLKKGKKSKRSM

SEQ ID NO: 30838 - protein, 38 aa, Artificial Sequence
  Quasi-synthetic sequence derived from human genome
RAKRTPKRAGIMIGLAWLISFILWAPAILCWQYLVGKR

SEQ ID NO: 30839 - protein, 38 aa, Artificial Sequence
  Quasi-synthetic sequence derived from human genome
FKKCIKSTVGFDAIRVYNKRLKALRKIQKLIKSGQLRA

SEQ ID NO: 30840 - protein, 38 aa, Artificial Sequence
  Quasi-synthetic sequence derived from human genome
WFICSLCVPRVRKLWSSRRPRTRRNLLLGTACAIYLGF

SEQ ID NO: 30841 - protein, 38 aa, Artificial Sequence
  Quasi-synthetic sequence derived from human genome
LKIVLDTFVYQIPRRIFIQLMKRFGLKATTKINWKQFL

SEQ ID NO: 30842 - protein, 38 aa, Artificial Sequence
  Quasi-synthetic sequence derived from human genome
PRKRYRRKLKKYGKNVGKVIIKGCRYVVIGLQGFAAAY

SEQ ID NO: 30843 - protein, 38 aa, Artificial Sequence
  Quasi-synthetic sequence derived from human genome
WLNNLPAKASRSKTRLKSQLLLQKYIAQRKWKKHFYVV

SEQ ID NO: 30844 - protein, 38 aa, Artificial Sequence
  Quasi-synthetic sequence derived from human genome
QPVKKNTLKKYKIACIVLLALLVIMSLGLGLGLGLRKL

SEQ ID NO: 30845 - protein, 38 aa, Artificial Sequence
  Quasi-synthetic sequence derived from human genome
HRPLRPLRLASRGLHAFLAAFLSGLLLALSCWGGRRRR

SEQ ID NO: 30846 - protein, 38 aa, Artificial Sequence
  Quasi-synthetic sequence derived from human genome
HFNRYLTRRRRIEIANALCLTERQIKIWFQNRRMKWKK

SEQ ID NO: 30847 - protein, 38 aa, Artificial Sequence
  Quasi-synthetic sequence derived from human genome
RTLFTLEELRAQMLIRIVLFLQKVWRGTLARMRYKRTK

SEQ ID NO: 30848 - protein, 38 aa, Artificial Sequence
  Quasi-synthetic sequence derived from human genome
CKLQRNRLAKTKKPFKIIVTIIITFFLCWCPYHTLNLL

SEQ ID NO: 30849 - protein, 38 aa, Artificial Sequence
  Quasi-synthetic sequence derived from human genome
ASCLVLLALCLLLPLLLLGGWKRWRRGRAARHVVAVVL

SEQ ID NO: 30850 - protein, 38 aa, Artificial Sequence
  Quasi-synthetic sequence derived from human genome
YNKNMQFLFVNKRLVLRTKLHKLIDFLLRKESIICKPK

SEQ ID NO: 30851 - protein, 38 aa, Artificial Sequence
  Quasi-synthetic sequence derived from human genome
RSWGYVLLIVLFCLFIFVLIYVRVFRKSRRSLNSQPLN

SEQ ID NO: 30852 - protein, 38 aa, Artificial Sequence
  Quasi-synthetic sequence derived from human genome
KYIWRIGTDGRTVRRTMNIVPRTKVKTIKMFLILNLLF

SEQ ID NO: 30853 - protein, 38 aa, Artificial Sequence
  Quasi-synthetic sequence derived from human genome
PLSRALLALRTRHIKAAGGIERFRARGGLRPLLALLRR

SEQ ID NO: 30854 - protein, 38 aa, Artificial Sequence
  Quasi-synthetic sequence derived from human genome
LLPALGFKNKTVLKKRCKDCYLVKRRGRWYVYCKTHPR

SEQ ID NO: 30855 - protein, 38 aa, Artificial Sequence
  Quasi-synthetic sequence derived from human genome
LKWLDMFSNWDKWLSRRFQKVKLRCRKGIPSSLRAKAW

SEQ ID NO: 30856 - protein, 38 aa, Artificial Sequence
  Quasi-synthetic sequence derived from human genome
VRLQSWVRMWCVRQRYCRLLNAVRIIQVYWRWHSCHSR

SEQ ID NO: 30857 - protein, 38 aa, Artificial Sequence
  Quasi-synthetic sequence derived from human genome
HRPVILRLPNRRALRLRASFSQPLFQAVAAICRLLSIR

SEQ ID NO: 30858 - protein, 38 aa, Artificial Sequence
  Quasi-synthetic sequence derived from human genome
IFSKVRIFGLKKRRLRRQDPQLKGIVTRLYCRQGYYLQ

SEQ ID NO: 30859 - protein, 38 aa, Artificial Sequence
  Quasi-synthetic sequence derived from human genome
RARAWRRMSRSFQIHHRTSFRTRREWVLLGIQKRTIKV

SEQ ID NO: 30860 - protein, 38 aa, Artificial Sequence
  Quasi-synthetic sequence derived from human genome
KFPFLSIRRSALLYIALHLKAFNPKGSEYTRKKYKKKM

SEQ ID NO: 30861 - protein, 38 aa, Artificial Sequence
  Quasi-synthetic sequence derived from human genome
TAFRVAKKRAPKVLGTTLVVGLLAGVGYFAFMLFRKRL

SEQ ID NO: 30862 - protein, 38 aa, Artificial Sequence
  Quasi-synthetic sequence derived from human genome
VPIRHSRKMRKLMLDLNKAKSMGQRLSLISKFRFNFLA

SEQ ID NO: 30863 - protein, 38 aa, Artificial Sequence
  Quasi-synthetic sequence derived from human genome
LASQKVKKIWQKQFRWPKNRLQILKFCKAREDLLKIQK

SEQ ID NO: 30864 - protein, 38 aa, Artificial Sequence
  Quasi-synthetic sequence derived from human genome
KIGMGRPGQRRLWEAVKRRKALCKRKSWMSKVFSGKRL

SEQ ID NO: 30865 - protein, 38 aa, Artificial Sequence
  Quasi-synthetic sequence derived from human genome
RFLARRTNSTFNQVVLKRLFMSRTNRPPLSLSRMIRKM

SEQ ID NO: 30866 - protein, 38 aa, Artificial Sequence
  Quasi-synthetic sequence derived from human genome
RALRGLSYRSLRRRVRRLRRLTAREAATAVAALLWAAV

SEQ ID NO: 30867 - protein, 38 aa, Artificial Sequence
  Quasi-synthetic sequence derived from human genome
FLLAVVLTVAFITFKCCAYGYRKCLGKKGRVKKAHKSK

SEQ ID NO: 30868 - protein, 38 aa, Artificial Sequence
  Quasi-synthetic sequence derived from human genome
IWKLFLRFQQNLLGFLLPLLAMIFFYSRIGCVLVRLRP

SEQ ID NO: 30869 - protein, 38 aa, Artificial Sequence
  Quasi-synthetic sequence derived from human genome
IMIQKTVRGWLQKVKYHRLKGATLTLQRYCRGHLARRL

SEQ ID NO: 30870 - protein, 38 aa, Artificial Sequence
  Quasi-synthetic sequence derived from human genome
LLVILACVLWKKRIKPIVWPSLPDHKKTLEHLCKKPRK

SEQ ID NO: 30871 - protein, 38 aa, Artificial Sequence
  Quasi-synthetic sequence derived from human genome
LRAAKWLHFPQLALRRRLGQLSCMSRPALKLRSWPLTV

SEQ ID NO: 30872 - protein, 38 aa, Artificial Sequence
  Quasi-synthetic sequence derived from human genome
RLRKNTVKFSLYRHFKNTLIFAVLASIVFMGWTTKTFR

SEQ ID NO: 30873 - protein, 38 aa, Artificial Sequence
  Quasi-synthetic sequence derived from human genome
VLKPHFHKDWQRRVATWFNQPARKIRRRKARQAKARRI

SEQ ID NO: 30874 - protein, 38 aa, Artificial Sequence
  Quasi-synthetic sequence derived from human genome
VRKYLLRLDVRKDHVKFWRPQLLLLVGNPRGALPLLRL

SEQ ID NO: 30875 - protein, 38 aa, Artificial Sequence
  Quasi-synthetic sequence derived from human genome
WLVRKRFLEQRAKIRLLHFTAAAYYHLNAVRIQRAYKL

SEQ ID NO: 30876 - protein, 38 aa, Artificial Sequence
  Quasi-synthetic sequence derived from human genome
SIRRLLILILKIGRRWTELIRTMESRVLLRTFCLIFGL

SEQ ID NO: 30877 - protein, 38 aa, Artificial Sequence
  Quasi-synthetic sequence derived from human genome
INANASIWWIIRGPVILSILINFILFINILRILMRKLR

SEQ ID NO: 30878 - protein, 38 aa, Artificial Sequence
  Quasi-synthetic sequence derived from human genome
RHKDVRRIRSLQRSVQVLRAIVVMYVICWLPYHARRLM

SEQ ID NO: 30879 - protein, 38 aa, Artificial Sequence
  Quasi-synthetic sequence derived from human genome
VVNRKFGNRIKVLRSRIRFIHLVTGCVLGSSGKVLPKW

SEQ ID NO: 30880 - protein, 38 aa, Artificial Sequence
  Quasi-synthetic sequence derived from human genome
LAFLPLVVTLLVRYRHYFRLLVRTVLLRSLRDCLSGLR

SEQ ID NO: 30881 - protein, 38 aa, Artificial Sequence
  Quasi-synthetic sequence derived from human genome
FYLLKIANFSNLIFLHLKRRVKSVVLVILLGPLLFLVC

SEQ ID NO: 30882 - protein, 38 aa, Artificial Sequence
  Quasi-synthetic sequence derived from human genome
RVLKRKTFNKVLGHVNNILISAVLPTAFRVAKKRAPKV

SEQ ID NO: 30883 - protein, 38 aa, Artificial Sequence
  Quasi-synthetic sequence derived from human genome
PVWFHVLFYLAVGIMFLVNTVLWVTIRKELKRKKKWNL

SEQ ID NO: 30884 - protein, 38 aa, Artificial Sequence
  Quasi-synthetic sequence derived from human genome
RGKRVVFLKQLASGLLLVTGPLVLNRVPLRRTHQKFVI

SEQ ID NO: 30885 - protein, 38 aa, Artificial Sequence
  Quasi-synthetic sequence derived from human genome
LKFWTHCVLATLIMFTIFSFFAEQLIALKRKIFPRRRI

SEQ ID NO: 30886 - protein, 38 aa, Artificial Sequence
  Quasi-synthetic sequence derived from human genome
CRIYNSTYLGRAFFGLKVALIFPVLVLLTVFIFVVRKK

SEQ ID NO: 30887 - protein, 38 aa, Artificial Sequence
  Quasi-synthetic sequence derived from human genome
WRQTRTLLLKNYLIKCRTKKSSVQEILFPLFFLFWLIL

SEQ ID NO: 30888 - protein, 38 aa, Artificial Sequence
  Quasi-synthetic sequence derived from human genome
RLKHRGSSLHPFRKGLQEKDKVWLLREQKRKKKLRKLL

SEQ ID NO: 30889 - protein, 38 aa, Artificial Sequence
  Quasi-synthetic sequence derived from human genome
LFQWVYQRRGLVHLCCSKLVNYLTPIKHLRKSLKIIYL

SEQ ID NO: 30890 - protein, 38 aa, Artificial Sequence
  Quasi-synthetic sequence derived from human genome
TRNLVLKNRSLKLQKMKYRPPKTKFFFTVIPQPIFLSP

SEQ ID NO: 30891 - protein, 38 aa, Artificial Sequence
  Quasi-synthetic sequence derived from human genome
YKTEKYVIAKNKKVGLLYRLLQASILAYLVVWVFLIKK

SEQ ID NO: 30892 - protein, 38 aa, Artificial Sequence
  Quasi-synthetic sequence derived from human genome
KYYEIVMLCGLLKMWEDLRLRVHGPFFPRILRRRKGKR

SEQ ID NO: 30893 - protein, 38 aa, Artificial Sequence
  Quasi-synthetic sequence derived from human genome
NNFINLSFLRLFRAARLIKLLRQGYTIRILLWTFVQSF

SEQ ID NO: 30894 - protein, 38 aa, Artificial Sequence
  Quasi-synthetic sequence derived from human genome
RAGITAAINLAKLKLFRHYYVLIVCYIYFTRIIAFLLK

SEQ ID NO: 30895 - protein, 38 aa, Artificial Sequence
  Quasi-synthetic sequence derived from human genome
AIILLMSMAFLTCCLLKCVKKSKRRRSNRSAQLWSQLK

SEQ ID NO: 30896 - protein, 38 aa, Artificial Sequence
  Quasi-synthetic sequence derived from human genome
LIYLRVATWNQILDPWVYILFRRAVLRRLQPRLSTRPR

SEQ ID NO: 30897 - protein, 38 aa, Artificial Sequence
  Quasi-synthetic sequence derived from human genome
MGFVKVVKNKAYFKRYQVKFRRRREGKTDYYARKRLVI

SEQ ID NO: 30898 - protein, 38 aa, Artificial Sequence
  Quasi-synthetic sequence derived from human genome
LDVIGFLLACVATVLFIITKCCLFCFWKFARKGKKGKR

SEQ ID NO: 30899 - protein, 38 aa, Artificial Sequence
  Quasi-synthetic sequence derived from human genome
VWRMAKGFVMLAVSFLVAAICYFRRLHLYSGHKLKWWI

SEQ ID NO: 30900 - protein, 38 aa, Artificial Sequence
  Quasi-synthetic sequence derived from human genome
LKDGGVLSPILTRLMNFFVFSRGLLQYINQRKKFRRRW

SEQ ID NO: 30901 - protein, 38 aa, Artificial Sequence
  Quasi-synthetic sequence derived from human genome
ILGMLRVLRLLRTLRPLRVISRAQGLKLVVETLMSSLK

SEQ ID NO: 30902 - protein, 38 aa, Artificial Sequence
  Quasi-synthetic sequence derived from human genome
LRRAAILRRERQQKAPRHPLADILHRGCPLLRRWLCRR

SEQ ID NO: 30903 - protein, 38 aa, Artificial Sequence
  Quasi-synthetic sequence derived from human genome
KPVSKKHGKLITFLRTFMKSRPTKQKLKQRGILKERVF

SEQ ID NO: 30904 - protein, 38 aa, Artificial Sequence
  Quasi-synthetic sequence derived from human genome
KVKKPKKVYCYVSPKQFSVKEFYLKIIPWRLYTFRVCP

SEQ ID NO: 30905 - protein, 38 aa, Artificial Sequence
  Quasi-synthetic sequence derived from human genome
IKIQSSYRRWMIRKRMREMHRAATFIQSTFRMHRLHMR

SEQ ID NO: 30906 - protein, 38 aa, Artificial Sequence
  Quasi-synthetic sequence derived from human genome
SSWLVWGVILFVYLVIRALRLWRTAKLQVTLKKYSVHL

SEQ ID NO: 30907 - protein, 38 aa, Artificial Sequence
  Quasi-synthetic sequence derived from human genome
VVKMRKEVKRIRVLVIRKLVRSVGRLKSKKGTEDALLK

SEQ ID NO: 30908 - protein, 38 aa, Artificial Sequence
  Quasi-synthetic sequence derived from human genome
WFRGCQVRAYIRHLNRIVTIIQKWWRSFLGRKQYQLTV

SEQ ID NO: 30909 - protein, 38 aa, Artificial Sequence
  Quasi-synthetic sequence derived from human genome
RMWRIRRRYCQVLNAVRIIQAYWRCRSCASRGFIKGQY

SEQ ID NO: 30910 - protein, 38 aa, Artificial Sequence
  Quasi-synthetic sequence derived from human genome
LARQHFKKRKIQDLAIRCVQKNIKKNKGVKDWPWWKLF

SEQ ID NO: 30911 - protein, 38 aa, Artificial Sequence
  Quasi-synthetic sequence derived from human genome
MYKVPLIRKKSLRRTLSERGLLKDFLKKHNLNPARKYF

SEQ ID NO: 30912 - protein, 38 aa, Artificial Sequence
  Quasi-synthetic sequence derived from human genome
LLTPWFCRRCIFALAVRKGGALKKGAIARTLQAVKMVL

SEQ ID NO: 30913 - protein, 38 aa, Artificial Sequence
  Quasi-synthetic sequence derived from human genome
AIIQRMYARRFLYHSRTRDLRDYIRIHRIPKPLKQRML

SEQ ID NO: 30914 - protein, 38 aa, Artificial Sequence
  Quasi-synthetic sequence derived from human genome
KKKFVDRAKRIDTISRAAFPLAFLIFNIFYWITYKIIR

SEQ ID NO: 30915 - protein, 38 aa, Artificial Sequence
  Quasi-synthetic sequence derived from human genome
VTGQSVWLQLLRICRVLRSLKLLAQFRQIQIIILVLVR

SEQ ID NO: 30916 - protein, 38 aa, Artificial Sequence
  Quasi-synthetic sequence derived from human genome
LTIFLVLLFSQYARNVKFPLPIYKSKKGWTAYKLQLFK

SEQ ID NO: 30917 - protein, 38 aa, Artificial Sequence
  Quasi-synthetic sequence derived from human genome
ARVRKLRSAGRCGKFHQVRRVMTILFLTMVISYFGCMK

SEQ ID NO: 30918 - protein, 38 aa, Artificial Sequence
  Quasi-synthetic sequence derived from human genome
KLIILFNIVMPPLLNPLIYTLRNNDVKNAMRKLFRVKR

SEQ ID NO: 30919 - protein, 38 aa, Artificial Sequence
  Quasi-synthetic sequence derived from human genome
RLVRVFRIFKLSRHSKGLQILGQTLRASMRELGLLIFF

SEQ ID NO: 30920 - protein, 38 aa, Artificial Sequence
  Quasi-synthetic sequence derived from human genome
LAILKAVKIIQGCFYTKLERTRFLNVRASAIIIQRKWR

SEQ ID NO: 30921 - protein, 38 aa, Artificial Sequence
  Quasi-synthetic sequence derived from human genome
FKYRILQILRVQNQFLWEKYKRKKEYMNRKMFGRDRII

SEQ ID NO: 30922 - protein, 38 aa, Artificial Sequence
  Quasi-synthetic sequence derived from human genome
HGLYMLFLLVLVFFLMGLVGFMICHVLKKKGYRCRTSR

SEQ ID NO: 30923 - protein, 38 aa, Artificial Sequence
  Quasi-synthetic sequence derived from human genome
TQAKLLAKKRVVRMLLVIVVLFFLCWLPVYSANTWRAF

SEQ ID NO: 30924 - protein, 38 aa, Artificial Sequence
  Quasi-synthetic sequence derived from human genome
RLWGVRKCKPQMNYDKLSRALRYYYNKRILHKTKGKRF

SEQ ID NO: 30925 - protein, 38 aa, Artificial Sequence
  Quasi-synthetic sequence derived from human genome
KYWRRVLAQRKLLMLKKEKLEKVQNKAASLIQGYWRRY

SEQ ID NO: 30926 - protein, 38 aa, Artificial Sequence
  Quasi-synthetic sequence derived from human genome
CISLVALLVAFVLFLRLRSIRCLRNIIHWNLISAFILR

SEQ ID NO: 30927 - protein, 38 aa, Artificial Sequence
  Quasi-synthetic sequence derived from human genome
WWRNNFWIILAVAIIVVSVGLGLILYCVCKWQLRRGKK

SEQ ID NO: 30928 - protein, 38 aa, Artificial Sequence
  Quasi-synthetic sequence derived from human genome
MALTVIAGLVVIFMMLGGTFLYWRGRRIQNKRAMRRYL

SEQ ID NO: 30929 - protein, 38 aa, Artificial Sequence
  Quasi-synthetic sequence derived from human genome
IFVFFRKLTTIFPLNWKYRKALSLGCQRVTLHKNMFLT

SEQ ID NO: 30930 - protein, 38 aa, Artificial Sequence
  Quasi-synthetic sequence derived from human genome
RKLRASITPGTILIILTGRHRGKRVVFLKQLASGLLLV

SEQ ID NO: 30931 - protein, 38 aa, Artificial Sequence
  Quasi-synthetic sequence derived from human genome
KGKRCIVLVTELMTSGTLKTYLKRFKVMKPKVLRSWCR

SEQ ID NO: 30932 - protein, 38 aa, Artificial Sequence
  Quasi-synthetic sequence derived from human genome
LGKLKRNMMPWALQKKREIHMAKAHRRRAARSALPMRL

SEQ ID NO: 30933 - protein, 38 aa, Artificial Sequence
  Quasi-synthetic sequence derived from human genome
FFFSRGRFSSGFRRTLILSSGFRLVKKKLYSLIGTTVI

SEQ ID NO: 30934 - protein, 38 aa, Artificial Sequence
  Quasi-synthetic sequence derived from human genome
HKTFMVLNRKRTIYRFSAKHALFIFGPFNSIRSLAIRV

SEQ ID NO: 30935 - protein, 38 aa, Artificial Sequence
  Quasi-synthetic sequence derived from human genome
FSFLIVVLVLYVSWKCFPASLRQLRQCFVTQRRKQKQK

SEQ ID NO: 30936 - protein, 38 aa, Artificial Sequence
  Quasi-synthetic sequence derived from human genome
IKPGSSFGISVLRALRLLRIFKVTKYWSSLRNLVVSLL

SEQ ID NO: 30937 - protein, 38 aa, Artificial Sequence
  Quasi-synthetic sequence derived from human genome
RLQRKAVISLQSYFRMRKARQYYLKMYKAIIVIQNYYH

SEQ ID NO: 30938 - protein, 38 aa, Artificial Sequence
  Quasi-synthetic sequence derived from human genome
YNYKTIVKKILAKLKRARSKKLDNFQSEKKVFKKSFLR

SEQ ID NO: 30939 - protein, 38 aa, Artificial Sequence
  Quasi-synthetic sequence derived from human genome
RLLMSLFLFFFVLFLCLFFYNCYKGYLPRQCLKFRSAL

SEQ ID NO: 30940 - protein, 38 aa, Artificial Sequence
  Quasi-synthetic sequence derived from human genome
CMYVCIREKILLYKTHWMTPIFLKVVINTRRIKHHFKI

SEQ ID NO: 30941 - protein, 38 aa, Artificial Sequence
  Quasi-synthetic sequence derived from human genome
VFYKFINLNRYKIRHTRKKPFKCKNCVKSFCMFSHKTQ

SEQ ID NO: 30942 - protein, 38 aa, Artificial Sequence
  Quasi-synthetic sequence derived from human genome
RFLNVRASAIIIQRKWRAILPAKIAHEHFLMIKRHRAA

SEQ ID NO: 30943 - protein, 38 aa, Artificial Sequence
  Quasi-synthetic sequence derived from human genome
KRFALKTRSQITKRKRMSLVKEKKAAQTLSAILLAFII

SEQ ID NO: 30944 - protein, 38 aa, Artificial Sequence
  Quasi-synthetic sequence derived from human genome
LRLLLWKNLTFRRRQTCQLLLEVAWPLFIFLILISVRL

SEQ ID NO: 30945 - protein, 38 aa, Artificial Sequence
  Quasi-synthetic sequence derived from human genome
LAGWRVLVGVGVPVVFIIILVLCLRLLQSRCPRVLPKK

SEQ ID NO: 30946 - protein, 38 aa, Artificial Sequence
  Quasi-synthetic sequence derived from human genome
WPPYKKRTSLHPSYKGLMRLLHCKTLHIVLFTLLYKIL

SEQ ID NO: 30947 - protein, 38 aa, Artificial Sequence
  Quasi-synthetic sequence derived from human genome
WLIYVVVRRTKLQMQTTALEFRQRIILRVWWSTWRQRL

SEQ ID NO: 30948 - protein, 38 aa, Artificial Sequence
  Quasi-synthetic sequence derived from human genome
KRKPSIKAARAKKIFGWGDFYFRVHTLKFSLLVTGKIV

SEQ ID NO: 30949 - protein, 38 aa, Artificial Sequence
  Quasi-synthetic sequence derived from human genome
LFSFFFIIFIVFISRKCCPPTLRRIRQCSMVQNHRQLR

SEQ ID NO: 30950 - protein, 38 aa, Artificial Sequence
  Quasi-synthetic sequence derived from human genome
PVGVGIAGALFILGALYSIKVMNRRRRNGFKRHKRKQR

SEQ ID NO: 30951 - protein, 38 aa, Artificial Sequence
  Quasi-synthetic sequence derived from human genome
KMMLVRRFRVLILMVFLVACALHIALDLLPRLERRGAR

SEQ ID NO: 30952 - protein, 38 aa, Artificial Sequence
  Quasi-synthetic sequence derived from human genome
FIPFFKYCLLRKSFTCWKKNVRLQGLHRLQKFLENHLL

SEQ ID NO: 30953 - protein, 38 aa, Artificial Sequence
  Quasi-synthetic sequence derived from human genome
KISAFLPARQLWKWSGNPTQRRGMKGKARKLFYKAIVR

SEQ ID NO: 30954 - protein, 38 aa, Artificial Sequence
  Quasi-synthetic sequence derived from human genome
LWLRAKFQRLLFKLGCYIQKNCGKFLVVGLLIFGAFAV

SEQ ID NO: 30955 - protein, 38 aa, Artificial Sequence
  Quasi-synthetic sequence derived from human genome
KISVLYSFLRSHLKKKSIVFFSSCKEVQYLYRVFCRLR

SEQ ID NO: 30956 - protein, 38 aa, Artificial Sequence
  Quasi-synthetic sequence derived from human genome
RAKFQRLLFKLGCYIQKNCGKFLVVGLLIFGAFAVGLK

SEQ ID NO: 30957 - protein, 38 aa, Artificial Sequence
  Quasi-synthetic sequence derived from human genome
KINKLFCFNFLVQCFRGKSKPSKCQIRKKVKNHIERLL

SEQ ID NO: 30958 - protein, 38 aa, Artificial Sequence
  Quasi-synthetic sequence derived from human genome
SLMIRRLRGVRLLSGSREKDRNLRRITRLVLVVVAVFV

SEQ ID NO: 30959 - protein, 38 aa, Artificial Sequence
  Quasi-synthetic sequence derived from human genome
RPRRRFLCHLSRQQLRMAMRIPVLYEQLKREKLRVHKA

SEQ ID NO: 30960 - protein, 38 aa, Artificial Sequence
  Quasi-synthetic sequence derived from human genome
KVIKKVIIPARMKRAGRVDFILQPLGMGPKNFIHGLRR

SEQ ID NO: 30961 - protein, 38 aa, Artificial Sequence
  Quasi-synthetic sequence derived from human genome
LGYLGLSFSWVLLALALLAWCRRSRGLKALRLCRALAL

SEQ ID NO: 30962 - protein, 38 aa, Artificial Sequence
  Quasi-synthetic sequence derived from human genome
RAGRPGLGAGLRLPRLLSPPLRPRLLLLLLLLSPPLLL

SEQ ID NO: 30963 - protein, 38 aa, Artificial Sequence
  Quasi-synthetic sequence derived from human genome
HWRGRYGRRRPFIWALSLGILLSLFLIPRAGWLAGLLC

SEQ ID NO: 30964 - protein, 38 aa, Artificial Sequence
  Quasi-synthetic sequence derived from human genome
WRLSVRCGGWPLRWLMENGFLPDPPRIRYRKKKRILKS

SEQ ID NO: 30965 - protein, 38 aa, Artificial Sequence
  Quasi-synthetic sequence derived from human genome
GRLKTWVYGVAAGAFVLLIFIVSMIYLACKKPKKPQRR

SEQ ID NO: 30966 - protein, 38 aa, Artificial Sequence
  Quasi-synthetic sequence derived from human genome
KVPRLICRWTSLHLLYLGNTGLHRLRGSFRCLVNLRFL

SEQ ID NO: 30967 - protein, 38 aa, Artificial Sequence
  Quasi-synthetic sequence derived from human genome
ILRDRFKSFQRRNMIEPRERAKFKRKYKVKLVEKRAFR

SEQ ID NO: 30968 - protein, 38 aa, Artificial Sequence
  Quasi-synthetic sequence derived from human genome
MKFHKKVGKLGVLDKKTIKTINKMKTLKRKNILNQILS

SEQ ID NO: 30969 - protein, 38 aa, Artificial Sequence
  Quasi-synthetic sequence derived from human genome
KQRFLFAKLFSHITSARKARKYEIPHFRLKKVENIKIW

SEQ ID NO: 30970 - protein, 38 aa, Artificial Sequence
  Quasi-synthetic sequence derived from human genome
PTFRRPKTLRLRRQPKYPRKSAPRRNKLDHYAIIKFPL

SEQ ID NO: 30971 - protein, 38 aa, Artificial Sequence
  Quasi-synthetic sequence derived from human genome
IIRRAKKIPKINILHKQTSGYIVYGLFMLHTKIVNRKT

SEQ ID NO: 30972 - protein, 38 aa, Artificial Sequence
  Quasi-synthetic sequence derived from human genome
RLVRVFRIFKLSRHSKGLQILGQTLKASMRELGLLIFF

SEQ ID NO: 30973 - protein, 38 aa, Artificial Sequence
  Quasi-synthetic sequence derived from human genome
IRRFIFLFFILVIGIYPSGHSLILILGNPKLKQNAKKF

SEQ ID NO: 30974 - protein, 38 aa, Artificial Sequence
  Quasi-synthetic sequence derived from human genome
RRLRWEGMKSVFGGPPSLLWMNPFVGFRFRRLPTRPRK

SEQ ID NO: 30975 - protein, 38 aa, Artificial Sequence
  Quasi-synthetic sequence derived from human genome
RRAWLSVLLGLVLGFVLASRLVLPRASELKRAGPRRRA

SEQ ID NO: 30976 - protein, 38 aa, Artificial Sequence
  Quasi-synthetic sequence derived from human genome
SAGVAVYRKYICTSFYPWVNILKISFKRKKFFIHQRQK

SEQ ID NO: 30977 - protein, 38 aa, Artificial Sequence
  Quasi-synthetic sequence derived from human genome
AGVAVYRKYICTSFYPWVNILKISFKRKKFFIHQRQKQ

SEQ ID NO: 30978 - protein, 38 aa, Artificial Sequence
  Quasi-synthetic sequence derived from human genome
IRKLIKDGLIIRKPVTVHSRARCRKNTLARRKGRHMGI

SEQ ID NO: 30979 - protein, 38 aa, Artificial Sequence
  Quasi-synthetic sequence derived from human genome
LMQLYSARQRRRLNRGLRRKQHSLLKRLRKAKKEAPPM

SEQ ID NO: 30980 - protein, 38 aa, Artificial Sequence
  Quasi-synthetic sequence derived from human genome
MKRKQKRFLQMTLLFTVALIFLPNVGLWSLYKDKHLVK

SEQ ID NO: 30981 - protein, 38 aa, Artificial Sequence
  Quasi-synthetic sequence derived from human genome
LRIPREHVHNASAHLTFNKFWRRYGKLSRHLMKVKLKK

SEQ ID NO: 30982 - protein, 38 aa, Artificial Sequence
  Quasi-synthetic sequence derived from human genome
GEAIFNFILVVMFWLIFLLIILSYIKIGKNLLRISKRR

SEQ ID NO: 30983 - protein, 38 aa, Artificial Sequence
  Quasi-synthetic sequence derived from human genome
LSLVCHEPLRIRRLLRPFFLLQNSSMMKKTLKCIRWSL

SEQ ID NO: 30984 - protein, 38 aa, Artificial Sequence
  Quasi-synthetic sequence derived from human genome
KHCRGYLVRSLYQLIRMATITMQAYSRGFLARRRYRKM

SEQ ID NO: 30985 - protein, 38 aa, Artificial Sequence
  Quasi-synthetic sequence derived from human genome
FRLLRVLKLVRFLPALRRQLVVLVKTMDNVATFCTLLM

SEQ ID NO: 30986 - protein, 38 aa, Artificial Sequence
  Quasi-synthetic sequence derived from human genome
VFRKFQVWRLVTNFLFFGPLGFSFFFNMLFVFRYCRML

SEQ ID NO: 30987 - protein, 38 aa, Artificial Sequence
  Quasi-synthetic sequence derived from human genome
LRAARLRHQELFRLRGIKAQVALRLAELARRQRRRQAR

SEQ ID NO: 30988 - protein, 38 aa, Artificial Sequence
  Quasi-synthetic sequence derived from human genome
KLVRFLFYTNLYCSILFLTCISVHRCLGVLRPLRSLRW

SEQ ID NO: 30989 - protein, 38 aa, Artificial Sequence
  Quasi-synthetic sequence derived from human genome
PRYWLWYTTKNCVGGLARKAWERLRLHRVNLIALQRRR

SEQ ID NO: 30990 - protein, 38 aa, Artificial Sequence
  Quasi-synthetic sequence derived from human genome
KKLPMILALHLKRFKYMEQLHRYTKLSYRVVFPLELRL

SEQ ID NO: 30991 - protein, 38 aa, Artificial Sequence
  Quasi-synthetic sequence derived from human genome
RIHQRWQFHSIGLILKKLLHTGNSLKIRREGVRLFLLW

SEQ ID NO: 30992 - protein, 38 aa, Artificial Sequence
  Quasi-synthetic sequence derived from human genome
KALLRLVSAVNRRRMKLLLGIALLAYVASVWGNFVNMR

SEQ ID NO: 30993 - protein, 38 aa, Artificial Sequence
  Quasi-synthetic sequence derived from human genome
RQLVTYIVVGVTLRPAILVIPCLLLIKCHLKLYRTKLI

SEQ ID NO: 30994 - protein, 38 aa, Artificial Sequence
  Quasi-synthetic sequence derived from human genome
RVIQVWFQNRRSKERRMKQLSALGARRHAFFRSPRRMR

SEQ ID NO: 30995 - protein, 38 aa, Artificial Sequence
  Quasi-synthetic sequence derived from human genome
AMMMKSWKIAIESLGFKRFKYSKFSHMHLMAFRKISLK

SEQ ID NO: 30996 - protein, 38 aa, Artificial Sequence
  Quasi-synthetic sequence derived from human genome
LWLRLRGKGLAMLHVTRGVWGSRVRVWPLLPALLGPPR

SEQ ID NO: 30997 - protein, 38 aa, Artificial Sequence
  Quasi-synthetic sequence derived from human genome
FLTCFAGFWLIWGLIVLLCCFCSFLRRRLKRRQEERLR

SEQ ID NO: 30998 - protein, 38 aa, Artificial Sequence
  Quasi-synthetic sequence derived from human genome
LGPVYLAGYLGLSITWLLLGALLWMWWRRNRRGKLGRL

SEQ ID NO: 30999 - protein, 38 aa, Artificial Sequence
  Quasi-synthetic sequence derived from human genome
LIIAKMRMVALKAGWQQRKRSERKITLMVMMVVMVFVI

SEQ ID NO: 31000 - protein, 38 aa, Artificial Sequence
  Quasi-synthetic sequence derived from human genome
VMLAARHYWNAWLPLLSSAVYRKKAKGALKRLIGIINK

SEQ ID NO: 31001 - protein, 39 aa, Artificial Sequence
  Quasi-synthetic sequence derived from human genome
PKRKKKKKFCYLCILLLIVLFILLCCLYRLCKKSKPIKK

SEQ ID NO: 31002 - protein, 39 aa, Artificial Sequence
  Quasi-synthetic sequence derived from human genome
WLRVRKARPQLILSRRPRRRLGSLRWCGRRRLRWRLLQA

SEQ ID NO: 31003 - protein, 39 aa, Artificial Sequence
  Quasi-synthetic sequence derived from human genome
KGLLIFLLLVILAMGLWVIRVQKRHKMPRMKKLMRNRMK

SEQ ID NO: 31004 - protein, 39 aa, Artificial Sequence
  Quasi-synthetic sequence derived from human genome
LRNIPRWTHLLRLLRLIILLRIFHLFHQKRQLEKLIRRR

SEQ ID NO: 31005 - protein, 39 aa, Artificial Sequence
  Quasi-synthetic sequence derived from human genome
RARLIPIIVLLLQKAWRGTLARWRCRRLRAIYTIMRWFR

SEQ ID NO: 31006 - protein, 39 aa, Artificial Sequence
  Quasi-synthetic sequence derived from human genome
FRIYAVSTLLLFLLFFLFRLLLRFLRLCRSFYITCRRLR

SEQ ID NO: 31007 - protein, 39 aa, Artificial Sequence
  Quasi-synthetic sequence derived from human genome
RMPFRRKIYYLPRRYKFMSRIDKQISRFRRWLPKKPMRL

SEQ ID NO: 31008 - protein, 39 aa, Artificial Sequence
  Quasi-synthetic sequence derived from human genome
LIYWPRFIRHKCKQRFTKITQYLIRIRKLTLKRQRKLVP

SEQ ID NO: 31009 - protein, 39 aa, Artificial Sequence
  Quasi-synthetic sequence derived from human genome
MLIRIVLFLQKVWRGTLARMRYKRTKAALTIIRYYRRYK

SEQ ID NO: 31010 - protein, 39 aa, Artificial Sequence
  Quasi-synthetic sequence derived from human genome
RLLKRLLGPKLRRFLKPQGHPRLLLWFKRGLALAAFLGL

SEQ ID NO: 31011 - protein, 39 aa, Artificial Sequence
  Quasi-synthetic sequence derived from human genome
MAHLKRLVKLHIKRHYHKKFWKLGAVIFFFIIVLVLMQR

SEQ ID NO: 31012 - protein, 39 aa, Artificial Sequence
  Quasi-synthetic sequence derived from human genome
LARKQYRKVLYCVVIIQKNYRAFLLRRRFLHLKKAAIVF

SEQ ID NO: 31013 - protein, 39 aa, Artificial Sequence
  Quasi-synthetic sequence derived from human genome
YWRMYVVRRRYKIRRAATIVLQSYLRGFLARNRYRKILR

SEQ ID NO: 31014 - protein, 39 aa, Artificial Sequence
  Quasi-synthetic sequence derived from human genome
LKMMHIAATLIQRRFRTLMMRRRFLSLKKTAILIQRKYR

SEQ ID NO: 31015 - protein, 39 aa, Artificial Sequence
  Quasi-synthetic sequence derived from human genome
RLCLRLLLLLGYRRRCPPLLRGLVQRWRYGKVCLRSLLY

SEQ ID NO: 31016 - protein, 39 aa, Artificial Sequence
  Quasi-synthetic sequence derived from human genome
FKRKKRIKRRALLFLSYILTHFIFLALLLILIVLLRHTD

SEQ ID NO: 31017 - protein, 39 aa, Artificial Sequence
  Quasi-synthetic sequence derived from human genome
SKSKLSRRWRRWNRFNRRRCRAAVKSVTFYWLVIVLVFL

SEQ ID NO: 31018 - protein, 39 aa, Artificial Sequence
  Quasi-synthetic sequence derived from human genome
RISKSKFSRYWRRWNRFCRRKCRAAVKSNVFYWLVIFLV

SEQ ID NO: 31019 - protein, 39 aa, Artificial Sequence
  Quasi-synthetic sequence derived from human genome
AVINFLAKQRLRKRVNAALVIQKYWRRVLAQRKLLMLKK

SEQ ID NO: 31020 - protein, 39 aa, Artificial Sequence
  Quasi-synthetic sequence derived from human genome
KLSRRWRRWNRFNRRRCRAAVKSVTFYWLVIVLVFLNTL

SEQ ID NO: 31021 - protein, 39 aa, Artificial Sequence
  Quasi-synthetic sequence derived from human genome
LRRKKKKTIKMLMLVVVLFALCWFPLNCYVLLLSSKVIR

SEQ ID NO: 31022 - protein, 39 aa, Artificial Sequence
  Quasi-synthetic sequence derived from human genome
LNPLVYALASRHFRARFRRLWPCGRRRRHRARRALRRVR

SEQ ID NO: 31023 - protein, 39 aa, Artificial Sequence
  Quasi-synthetic sequence derived from human genome
MKRALGRRKGVWLRLRKILFCVLGLYIAIPFLIKLCPGI

SEQ ID NO: 31024 - protein, 39 aa, Artificial Sequence
  Quasi-synthetic sequence derived from human genome
VKAVIDRFLRLHCGLWVRRKAGYKKKLWKKTPARKKRLR

SEQ ID NO: 31025 - protein, 39 aa, Artificial Sequence
  Quasi-synthetic sequence derived from human genome
IVSFYVPFIVTLLVYIKIYIVLRRRRKRVNTKRSSRAFR

SEQ ID NO: 31026 - protein, 39 aa, Artificial Sequence
  Quasi-synthetic sequence derived from human genome
LKIRRRKMNHHKYRKLVKKTRFLRRKVQEGRLRRKQIKF

SEQ ID NO: 31027 - protein, 39 aa, Artificial Sequence
  Quasi-synthetic sequence derived from human genome
KKKKKRYLRASSNRNFLLTMRPFLKRAILVLSYVLVILY

SEQ ID NO: 31028 - protein, 39 aa, Artificial Sequence
  Quasi-synthetic sequence derived from human genome
KKRSRIPLLRKRRFQLGRSMNPRARKNRSRIPLLRKRRF

SEQ ID NO: 31029 - protein, 39 aa, Artificial Sequence
  Quasi-synthetic sequence derived from human genome
RFRSLLVRRRFISLKKATIFVQRKYRATICAKHKLYQFL

SEQ ID NO: 31030 - protein, 39 aa, Artificial Sequence
  Quasi-synthetic sequence derived from human genome
RRLRKNLRALVVVHATWYVKAFLALLRPFISSKFTRKIR

SEQ ID NO: 31031 - protein, 39 aa, Artificial Sequence
  Quasi-synthetic sequence derived from human genome
YRLRRVIAAFYFPKREKKRILFLYNDLLKKRAAFTKLRR

SEQ ID NO: 31032 - protein, 39 aa, Artificial Sequence
  Quasi-synthetic sequence derived from human genome
WRRRSCWRKWKQLSRLQRNMILFLLAFLLFCGLLFYINL

SEQ ID NO: 31033 - protein, 39 aa, Artificial Sequence
  Quasi-synthetic sequence derived from human genome
KYFFSPTLFRVIRLARIGRILRLIRGAKGIRTLLFALMM

SEQ ID NO: 31034 - protein, 39 aa, Artificial Sequence
  Quasi-synthetic sequence derived from human genome
AKRCNRRLKSQILLKKYLMKRRWKKNFIAVSAANRFKKI

SEQ ID NO: 31035 - protein, 39 aa, Artificial Sequence
  Quasi-synthetic sequence derived from human genome
LIVRVLVRAHRHRGLRPRRQKALRMILAVVLVFFVCWLP

SEQ ID NO: 31036 - protein, 39 aa, Artificial Sequence
  Quasi-synthetic sequence derived from human genome
RFLKHAGKWSLRWFLSPRWILQFRRWARKWSRFTRSSFQ

SEQ ID NO: 31037 - protein, 39 aa, Artificial Sequence
  Quasi-synthetic sequence derived from human genome
WRRYGKLSRHLMKVKLKKYTKFLFVRDPFVRLISAFRSK

SEQ ID NO: 31038 - protein, 39 aa, Artificial Sequence
  Quasi-synthetic sequence derived from human genome
HRKRMGLKMLMMMALLVPLVYTIKRHKWSVLKSRKLAYR

SEQ ID NO: 31039 - protein, 39 aa, Artificial Sequence
  Quasi-synthetic sequence derived from human genome
LMNNRTGRRKSWRLEFLFLRRRCFLLTFYLWFLFFSRFL

SEQ ID NO: 31040 - protein, 39 aa, Artificial Sequence
  Quasi-synthetic sequence derived from human genome
RIPLLRKRRFQLGRSMNLRARKNRSQIVLFQKRRFQFFC

SEQ ID NO: 31041 - protein, 39 aa, Artificial Sequence
  Quasi-synthetic sequence derived from human genome
LTLQRCLRGFFIKRRFRSLRHKIILLQSRARGYLARQRY

SEQ ID NO: 31042 - protein, 39 aa, Artificial Sequence
  Quasi-synthetic sequence derived from human genome
VLVRRTLLVAALRAWMIQCWWRTLVQRRIRQRRQALLRV

SEQ ID NO: 31043 - protein, 39 aa, Artificial Sequence
  Quasi-synthetic sequence derived from human genome
RKLFIQRAKKIDKISRIGFPMAFLIFNMFYWIIYKIVRR

SEQ ID NO: 31044 - protein, 39 aa, Artificial Sequence
  Quasi-synthetic sequence derived from human genome
VLLRRVTRNLVRNKLAVITRLLQNLIMGLFLLFFVLRVR

SEQ ID NO: 31045 - protein, 39 aa, Artificial Sequence
  Quasi-synthetic sequence derived from human genome
RSRIPLLRKRRFQLYRSTNPRARKNRSRIPLLRKRRFQL

SEQ ID NO: 31046 - protein, 39 aa, Artificial Sequence
  Quasi-synthetic sequence derived from human genome
IGFFRRKLIDAVGFSPLRILRKRNKALRKIRKLQKQGLL

SEQ ID NO: 31047 - protein, 39 aa, Artificial Sequence
  Quasi-synthetic sequence derived from human genome
AKLLKKRSKQPLGEVKRRLSLYLTKIHFWLPVLKMIRKK

SEQ ID NO: 31048 - protein, 39 aa, Artificial Sequence
  Quasi-synthetic sequence derived from human genome
AIFNFILVVMFWLIFLLIILSYIKIGKNLLRISKRRSKF

SEQ ID NO: 31049 - protein, 39 aa, Artificial Sequence
  Quasi-synthetic sequence derived from human genome
LKLTCSAFRLQRALRFLLGRLPWRVASGARRFRRWLNRY

SEQ ID NO: 31050 - protein, 39 aa, Artificial Sequence
  Quasi-synthetic sequence derived from human genome
LVHSLNLLAKQGLRLLRGLRRRNVQKKVALAKKLLAKLR

SEQ ID NO: 31051 - protein, 39 aa, Artificial Sequence
  Quasi-synthetic sequence derived from human genome
RRLRRLAHLVLFCPFSKRLQGRLPGLRVRCIFLAWLGVF

SEQ ID NO: 31052 - protein, 39 aa, Artificial Sequence
  Quasi-synthetic sequence derived from human genome
LLRRLRAVRLRSGAKALGKARRKVTVLVLVVLAVCLLCW

SEQ ID NO: 31053 - protein, 39 aa, Artificial Sequence
  Quasi-synthetic sequence derived from human genome
WRILKVLLWLLAILTGLIAGKFLFHQRLFGQLLRLKMFR

SEQ ID NO: 31054 - protein, 39 aa, Artificial Sequence
  Quasi-synthetic sequence derived from human genome
ALFVYLNRKIVQVMRKQKTINRFLMRKRLLFPALVTLLI

SEQ ID NO: 31055 - protein, 39 aa, Artificial Sequence
  Quasi-synthetic sequence derived from human genome
KKIIQKHFEKKKDIRRGIGYLKLICFLIPFLLSLKKKMK

SEQ ID NO: 31056 - protein, 39 aa, Artificial Sequence
  Quasi-synthetic sequence derived from human genome
KYFVSPTLFRVIRLARIGRILRLIKGAKGIRTLLFALMM

SEQ ID NO: 31057 - protein, 39 aa, Artificial Sequence
  Quasi-synthetic sequence derived from human genome
VLTFLGHRLLKRLLGPKLRRFLKPQGHPRLLLWFKRDPR

SEQ ID NO: 31058 - protein, 39 aa, Artificial Sequence
  Quasi-synthetic sequence derived from human genome
RIPLLRKRRFQLYRSMNSRARKNRSQIVLFQKRRFHFFC

SEQ ID NO: 31059 - protein, 39 aa, Artificial Sequence
  Quasi-synthetic sequence derived from human genome
LKKKRRNFAELKIKRLRKKFAQKMLRKARRKLIYEKAKH

SEQ ID NO: 31060 - protein, 39 aa, Artificial Sequence
  Quasi-synthetic sequence derived from human genome
LRIRCVARKFLYLWIRMTFGRVFPSKARFYYEQRLLRKV

SEQ ID NO: 31061 - protein, 39 aa, Artificial Sequence
  Quasi-synthetic sequence derived from human genome
MKTRVCRRLRRANRVLRARCRRAVKSNACYWAVLLLVFL

SEQ ID NO: 31062 - protein, 39 aa, Artificial Sequence
  Quasi-synthetic sequence derived from human genome
RRIRYEFKAKNIKKKKVSIMVSVDGVKVILKKKKKLLLL

SEQ ID NO: 31063 - protein, 39 aa, Artificial Sequence
  Quasi-synthetic sequence derived from human genome
IRNIGIWFFWIRLYKIRRGRTRPQALLFLCMILLLIVLH

SEQ ID NO: 31064 - protein, 39 aa, Artificial Sequence
  Quasi-synthetic sequence derived from human genome
KYFVSPTLFRVIRLARIGRVLRLIRGAKGIRTLLFALMM

SEQ ID NO: 31065 - protein, 39 aa, Artificial Sequence
  Quasi-synthetic sequence derived from human genome
RRSQRASFKRARRPGARALRLVLGIVLLFWACFLPFWLW

SEQ ID NO: 31066 - protein, 39 aa, Artificial Sequence
  Quasi-synthetic sequence derived from human genome
FFSTLVLLLSIAIFQRQKRRKFWKAKNLQHIPLKKGKRV

SEQ ID NO: 31067 - protein, 39 aa, Artificial Sequence
  Quasi-synthetic sequence derived from human genome
TLFRVIRLARIGRILRLIRAAKGIRTLLFALMMSLPALF

SEQ ID NO: 31068 - protein, 39 aa, Artificial Sequence
  Quasi-synthetic sequence derived from human genome
IQRALRAPRKKIHRRVLKKNPLKNLRIMLKLNPYAKTMR

SEQ ID NO: 31069 - protein, 39 aa, Artificial Sequence
  Quasi-synthetic sequence derived from human genome
KFFLLKRFNKEKLGLLLLTFLGIVAAVLVKKYQAVLRRK

SEQ ID NO: 31070 - protein, 39 aa, Artificial Sequence
  Quasi-synthetic sequence derived from human genome
LRTFRVFRALKAISVVSRLKVIVGALLRSVKKLVNVIIL

SEQ ID NO: 31071 - protein, 39 aa, Artificial Sequence
  Quasi-synthetic sequence derived from human genome
PPKPKLSKFILISSLAILLMVSLLLLSLWKLWRVKKFLI

SEQ ID NO: 31072 - protein, 39 aa, Artificial Sequence
  Quasi-synthetic sequence derived from human genome
ILMTILINFLIFIRILGILLSKLRTRQMRCRDYRLRLAR

SEQ ID NO: 31073 - protein, 39 aa, Artificial Sequence
  Quasi-synthetic sequence derived from human genome
RKYKKNIKALYIVHPTMFIKTLLILFKPLISFKFGQKIF

SEQ ID NO: 31074 - protein, 39 aa, Artificial Sequence
  Quasi-synthetic sequence derived from human genome
VRLLRLIILIRIFHLLHQKRQLEKLMRRLVSENKRRYTR

SEQ ID NO: 31075 - protein, 39 aa, Artificial Sequence
  Quasi-synthetic sequence derived from human genome
LAVIRGGATRAAGVFYPWRFRLLCLLRRWLPRPRAWFIR

SEQ ID NO: 31076 - protein, 39 aa, Artificial Sequence
  Quasi-synthetic sequence derived from human genome
VILQKYARAWLARRRFQSIRRFVLNIQLTYRVQRLQKKL

SEQ ID NO: 31077 - protein, 39 aa, Artificial Sequence
  Quasi-synthetic sequence derived from human genome
FKERLKLFFIKNQRSSLRIRLFNFSLKLLSCLLYIIRVL

SEQ ID NO: 31078 - protein, 39 aa, Artificial Sequence
  Quasi-synthetic sequence derived from human genome
RSKQLRRQMWWRGCKIKAIMALVAAILLLVIIILIVMKY

SEQ ID NO: 31079 - protein, 39 aa, Artificial Sequence
  Quasi-synthetic sequence derived from human genome
FFSILTVRSALFALRYNILTLMRMLSLKSLKKQMKKVKK

SEQ ID NO: 31080 - protein, 39 aa, Artificial Sequence
  Quasi-synthetic sequence derived from human genome
RRRPALGWLARLLRSRAGSRKRPLTLLQRAGLLLLLGLL

SEQ ID NO: 31081 - protein, 39 aa, Artificial Sequence
  Quasi-synthetic sequence derived from human genome
FKSAPILKRALKVKQAMLQLYVLKLLKLQTKYLGRQWRK

SEQ ID NO: 31082 - protein, 39 aa, Artificial Sequence
  Quasi-synthetic sequence derived from human genome
RSRIPLLRKRRFQLYRSTNPRARKNRSRIPLLRKHRFQL

SEQ ID NO: 31083 - protein, 39 aa, Artificial Sequence
  Quasi-synthetic sequence derived from human genome
KLNRFLLLFIGFVCVLLSFFMARVFMRMKLPRSLALLPR

SEQ ID NO: 31084 - protein, 39 aa, Artificial Sequence
  Quasi-synthetic sequence derived from human genome
RGQILVICLIAVMVVFIILVIGVCTCCHPLRKRRKRKKK

SEQ ID NO: 31085 - protein, 39 aa, Artificial Sequence
  Quasi-synthetic sequence derived from human genome
SHIPLVRKRRFQLRRCMNPRARKNRSQIVLFQKRRFHFF

SEQ ID NO: 31086 - protein, 39 aa, Artificial Sequence
  Quasi-synthetic sequence derived from human genome
LRVKRSVTRIKKRSRSVFYRLTILILVFAVSWMPLHLFH

SEQ ID NO: 31087 - protein, 39 aa, Artificial Sequence
  Quasi-synthetic sequence derived from human genome
LIAAGVIGGLFILVIVGLTFAVYVRRKSIKKKRALRRFL

SEQ ID NO: 31088 - protein, 39 aa, Artificial Sequence
  Quasi-synthetic sequence derived from human genome
KHLCRLKIRKCMGRLHLRCPVFMSFLPLPNRLKAYVLYK

SEQ ID NO: 31089 - protein, 39 aa, Artificial Sequence
  Quasi-synthetic sequence derived from human genome
RLGLLGRRGFSGRLGGYWKTWIFWKTWIFWKTWIFRKTY

SEQ ID NO: 31090 - protein, 39 aa, Artificial Sequence
  Quasi-synthetic sequence derived from human genome
KLFMRMASKQLRENVLVKRKRTKGKKLLLSIGVLLHKWK

SEQ ID NO: 31091 - protein, 39 aa, Artificial Sequence
  Quasi-synthetic sequence derived from human genome
RRGRPSRRFLGKKYRKYYYKSPKPLLRPFLCRICGSRFL

SEQ ID NO: 31092 - protein, 39 aa, Artificial Sequence
  Quasi-synthetic sequence derived from human genome
WMRRMRILRRLLRRYRESKKIDRHMYHSLYLKVKGNVFK

SEQ ID NO: 31093 - protein, 39 aa, Artificial Sequence
  Quasi-synthetic sequence derived from human genome
FKERLKLFFIKNQRSSLRIRLFNFSLKLLTCLLYIVRVL

SEQ ID NO: 31094 - protein, 39 aa, Artificial Sequence
  Quasi-synthetic sequence derived from human genome
MKIFKCYFKHTLQQKVFILFLTLWLLSLLKLLNVRRLFP

SEQ ID NO: 31095 - protein, 39 aa, Artificial Sequence
  Quasi-synthetic sequence derived from human genome
RYWRRWNRFCRRKCRAAVKSNVFYWLVIFLVFLNTLTIA

SEQ ID NO: 31096 - protein, 39 aa, Artificial Sequence
  Quasi-synthetic sequence derived from human genome
AWWRGMLVRRTLLHAALRAWIIQCWWRQVLEKLLAKRRR

SEQ ID NO: 31097 - protein, 39 aa, Artificial Sequence
  Quasi-synthetic sequence derived from human genome
WKCYKARKFFLFYRQQKWASGVIAIAWLLYCHKTRLKKI

SEQ ID NO: 31098 - protein, 39 aa, Artificial Sequence
  Quasi-synthetic sequence derived from human genome
RPGAWRRDIFGRIIWHKFKQWVIPWHLNKRYNRKRFFAL

SEQ ID NO: 31099 - protein, 39 aa, Artificial Sequence
  Quasi-synthetic sequence derived from human genome
FKLLILLIGTWALFFRKRRADMPRVFVFRALLLVLIFLF

SEQ ID NO: 31100 - protein, 39 aa, Artificial Sequence
  Quasi-synthetic sequence derived from human genome
RQIQLLLWKNWTLRKRQKIRFVVELVWPLSLFLVLIWLR

SEQ ID NO: 31101 - protein, 39 aa, Artificial Sequence
  Quasi-synthetic sequence derived from human genome
RLKNIRKVYGRCMWYRLRLLKPQPNIIPTVKKIVLLAGW

SEQ ID NO: 31102 - protein, 39 aa, Artificial Sequence
  Quasi-synthetic sequence derived from human genome
MFLTALLWRGRIPGRQWIGKHRRPRFVSLRAKQNMIRRL

SEQ ID NO: 31103 - protein, 39 aa, Artificial Sequence
  Quasi-synthetic sequence derived from human genome
AWRGFHWRQKFLRVKRSAICIQSWWRGTLGRRKAAKRKW

SEQ ID NO: 31104 - protein, 39 aa, Artificial Sequence
  Quasi-synthetic sequence derived from human genome
LLPLRMPLSRWQRRLRRAARRQVLSGHLPFCRFRLRYPS

SEQ ID NO: 31105 - protein, 39 aa, Artificial Sequence
  Quasi-synthetic sequence derived from human genome
ALVTLLIWVPVKVILHKKRYIYRKIKGWRPVLMMCVVLT

SEQ ID NO: 31106 - protein, 39 aa, Artificial Sequence
  Quasi-synthetic sequence derived from human genome
FKLLILLLGSWALFFRRPKASLPRVFVLRALLMVLVFLL

SEQ ID NO: 31107 - protein, 39 aa, Artificial Sequence
  Quasi-synthetic sequence derived from human genome
LVRKQMRLQRKAVISLQSYFRMRKARQYYLKMYKAIIVI

SEQ ID NO: 31108 - protein, 39 aa, Artificial Sequence
  Quasi-synthetic sequence derived from human genome
TLFRVIRLARIGRILRLVKGAKGIRTLLFALMMSLPALF

SEQ ID NO: 31109 - protein, 39 aa, Artificial Sequence
  Quasi-synthetic sequence derived from human genome
RFLKIIRPLRNIFLKKPVFAKTVSIFIWFFLFFISLPNT

SEQ ID NO: 31110 - protein, 39 aa, Artificial Sequence
  Quasi-synthetic sequence derived from human genome
KRMRVKKLPMILALHLKRFKYMEQLHRYTKLSYRVVFPL

SEQ ID NO: 31111 - protein, 39 aa, Artificial Sequence
  Quasi-synthetic sequence derived from human genome
KAARDVLGFLRVVRFVRILRIFKLTRHFVGLRVLGHTLR

SEQ ID NO: 31112 - protein, 39 aa, Artificial Sequence
  Quasi-synthetic sequence derived from human genome
YWRRYSTRQRFLKLKYYSIILQSRIRMIIAVTSYKRYLW

SEQ ID NO: 31113 - protein, 39 aa, Artificial Sequence
  Quasi-synthetic sequence derived from human genome
LRILHISVMGGMIALLLSILCLVMILYTRRRWCKRRRVP

SEQ ID NO: 31114 - protein, 39 aa, Artificial Sequence
  Quasi-synthetic sequence derived from human genome
LLSKAKQKLLRHLVPAAALRRKRKALWAHLFSSLRGYLK

SEQ ID NO: 31115 - protein, 39 aa, Artificial Sequence
  Quasi-synthetic sequence derived from human genome
RAFLLRRRFLHLKKAAIVFQKQLRGQIARRVYRQLLAEK

SEQ ID NO: 31116 - protein, 39 aa, Artificial Sequence
  Quasi-synthetic sequence derived from human genome
IILFCSFKIVWSLRRRQQLARQARMKKATRFIMVVAIVF

SEQ ID NO: 31117 - protein, 39 aa, Artificial Sequence
  Quasi-synthetic sequence derived from human genome
RRRNTPFHERFFRFLLRKLYVFRRSFLMTCISLRNLILG

SEQ ID NO: 31118 - protein, 39 aa, Artificial Sequence
  Quasi-synthetic sequence derived from human genome
LKLLLPGLLLLLVVIILILAFWVLPKYKTRKAMRNNVPR

SEQ ID NO: 31119 - protein, 39 aa, Artificial Sequence
  Quasi-synthetic sequence derived from human genome
KAAKDVLGFLRVVRFVRILRIFKLTRHFVGLRVLGHTLR

SEQ ID NO: 31120 - protein, 39 aa, Artificial Sequence
  Quasi-synthetic sequence derived from human genome
KLRADKLRAACIRIQKTIRGWLLRKKYLRMRKAAITMQR

SEQ ID NO: 31121 - protein, 39 aa, Artificial Sequence
  Quasi-synthetic sequence derived from human genome
KRMKVKKLPMILALHLKRFKYMDQLHRYTKLSYRVVFPL

SEQ ID NO: 31122 - protein, 39 aa, Artificial Sequence
  Quasi-synthetic sequence derived from human genome
RIPLLRKHRFQLYRSMNSRARKNRSQIVLFQKRRFHFFC

SEQ ID NO: 31123 - protein, 39 aa, Artificial Sequence
  Quasi-synthetic sequence derived from human genome
VAVLVALLAVIVLVALLLLWRRRQKRRTGALVLSRGGKR

SEQ ID NO: 31124 - protein, 39 aa, Artificial Sequence
  Quasi-synthetic sequence derived from human genome
RLTRWRTRYKTIRINLGLWAASFILALPVWVYSKVIKFK

SEQ ID NO: 31125 - protein, 39 aa, Artificial Sequence
  Quasi-synthetic sequence derived from human genome
FWCRFRRAFVTVTHRLLLLCLGVVMVCVVLRYMKYRWTK

SEQ ID NO: 31126 - protein, 39 aa, Artificial Sequence
  Quasi-synthetic sequence derived from human genome
QLALLGLGLLHALLLVLLLCRLRRLRARARARAAARLSL

SEQ ID NO: 31127 - protein, 39 aa, Artificial Sequence
  Quasi-synthetic sequence derived from human genome
KLVSPKWKNFKGLKLLCRDKIRLNNAIWRAWYIQYVKRR

SEQ ID NO: 31128 - protein, 39 aa, Artificial Sequence
  Quasi-synthetic sequence derived from human genome
RVILAPWKKGLIAVVIIGVIIALLIIAAKCYFLRKAKAK

SEQ ID NO: 31129 - protein, 39 aa, Artificial Sequence
  Quasi-synthetic sequence derived from human genome
HRYQQLGAGLKVLFKKTHRILRRLFNLCKRCHRQPRFRL

SEQ ID NO: 31130 - protein, 39 aa, Artificial Sequence
  Quasi-synthetic sequence derived from human genome
KKIRKQMKLLLLLLLLSCAAWLTYVHLGLVRQGRALRQR

SEQ ID NO: 31131 - protein, 39 aa, Artificial Sequence
  Quasi-synthetic sequence derived from human genome
QAWWRGTLVRRALLHAALSACIIQCWWRLILSKILKKRR

SEQ ID NO: 31132 - protein, 39 aa, Artificial Sequence
  Quasi-synthetic sequence derived from human genome
LKRFKVMKPKVLRSWCRQILKGLLFLHTRTPPIIHRDLK

SEQ ID NO: 31133 - protein, 39 aa, Artificial Sequence
  Quasi-synthetic sequence derived from human genome
IIRKYISKYSVFLRHRYQSRSAFLGRYLKKKKSVVSRLK

SEQ ID NO: 31134 - protein, 39 aa, Artificial Sequence
  Quasi-synthetic sequence derived from human genome
KIKTFLSLVWKRRILFFVVTLVSVFLVWKFTYAHKYLLA

SEQ ID NO: 31135 - protein, 39 aa, Artificial Sequence
  Quasi-synthetic sequence derived from human genome
LVLLVSLGVAIHLCCRRRRARLRFMKQKFNIVCLKISGF

SEQ ID NO: 31136 - protein, 39 aa, Artificial Sequence
  Quasi-synthetic sequence derived from human genome
SPRAARPPLLLRPVKLLRRRFRLLLALAVVSVGLWTLYL

SEQ ID NO: 31137 - protein, 39 aa, Artificial Sequence
  Quasi-synthetic sequence derived from human genome
PTPLLPLLLRLLLSCLLLPAARLARQYLLPLLRRLARRL

SEQ ID NO: 31138 - protein, 39 aa, Artificial Sequence
  Quasi-synthetic sequence derived from human genome
MRARRKTAKMLMVVLLVFALCYLPISVLNVLKRVFGMFR

SEQ ID NO: 31139 - protein, 39 aa, Artificial Sequence
  Quasi-synthetic sequence derived from human genome
CTRKLTHLRKRIHRPRRRTTRRWKRWFKFRKRKGEKRPR

SEQ ID NO: 31140 - protein, 39 aa, Artificial Sequence
  Quasi-synthetic sequence derived from human genome
RAGAARVARWRRLRLQQLRRLRGLLRVLRGRPGAGSRRR

SEQ ID NO: 31141 - protein, 39 aa, Artificial Sequence
  Quasi-synthetic sequence derived from human genome
KLRHSVIYIQAIFRGKKARRHLKMMHIAATLIQRRFRTL

SEQ ID NO: 31142 - protein, 39 aa, Artificial Sequence
  Quasi-synthetic sequence derived from human genome
FKSAPILKRALKVKQAMMQLYVLKLLKVQTKYLGRQWRK

SEQ ID NO: 31143 - protein, 39 aa, Artificial Sequence
  Quasi-synthetic sequence derived from human genome
VIRRKVSKIQRFHARSLWTNHKRYGYKKHSYRLVKKLKL

SEQ ID NO: 31144 - protein, 39 aa, Artificial Sequence
  Quasi-synthetic sequence derived from human genome
LRIRTKAAVKIQAWWRGTLVRRTLLHAALRAWIIQCWWR

SEQ ID NO: 31145 - protein, 39 aa, Artificial Sequence
  Quasi-synthetic sequence derived from human genome
RYVRGYQARCYAKFLRRTKAATIIQKYWRMYVVRRRYKI

SEQ ID NO: 31146 - protein, 39 aa, Artificial Sequence
  Quasi-synthetic sequence derived from human genome
RHLRRPRVARLLCLGVWALILVFAVPAARVHRPSRCRYR

SEQ ID NO: 31147 - protein, 39 aa, Artificial Sequence
  Quasi-synthetic sequence derived from human genome
PRPLAHLCRLRVRKAIGKYRIKLLDTLPLPGRLIRYLKY

SEQ ID NO: 31148 - protein, 39 aa, Artificial Sequence
  Quasi-synthetic sequence derived from human genome
LWFAAWLKVFYCLRIANFNHPLFFLMKRKIIVLMPWLLR

SEQ ID NO: 31149 - protein, 39 aa, Artificial Sequence
  Quasi-synthetic sequence derived from human genome
VLRGNTKINTFNWAKIRKLSFKRKHFLIKLHANILVLCK

SEQ ID NO: 31150 - protein, 39 aa, Artificial Sequence
  Quasi-synthetic sequence derived from human genome
LEILRGKMMQRRPRSAEVKYFYFFKILLRLRLAILKYLF

SEQ ID NO: 31151 - protein, 39 aa, Artificial Sequence
  Quasi-synthetic sequence derived from human genome
RHFVPQMPFVPAVAKSIPRKRISLKRPKKCFRNLFHIRR

SEQ ID NO: 31152 - protein, 39 aa, Artificial Sequence
  Quasi-synthetic sequence derived from human genome
FRYLQRLLLVHGRWSYIRMCKFLRYFFYKNFAFTLVHFW

SEQ ID NO: 31153 - protein, 39 aa, Artificial Sequence
  Quasi-synthetic sequence derived from human genome
LLRLLGLRRGLRRLRRLWAGPRVQRGRGRGRGRGWGPSR

SEQ ID NO: 31154 - protein, 39 aa, Artificial Sequence
  Quasi-synthetic sequence derived from human genome
KLLKRLRLLPALLILRAFKPHRKIRDYRVVVVGTAGVGK

SEQ ID NO: 31155 - protein, 39 aa, Artificial Sequence
  Quasi-synthetic sequence derived from human genome
KNYIINKDILRRVLVLMASKHAFLALCALRFKRKIIGLK

SEQ ID NO: 31156 - protein, 39 aa, Artificial Sequence
  Quasi-synthetic sequence derived from human genome
SWYRMHKELRKYIYIRSCVVIIQKRFRCFQAQKLYKRRK

SEQ ID NO: 31157 - protein, 39 aa, Artificial Sequence
  Quasi-synthetic sequence derived from human genome
LVILLVIYVSWKRYPASMKQLQQRSLMRRHRKKKRQSLK

SEQ ID NO: 31158 - protein, 39 aa, Artificial Sequence
  Quasi-synthetic sequence derived from human genome
KLKEVTLFVKRLRRKTYLSNMAKTMRMVLKSKRRVSVLK

SEQ ID NO: 31159 - protein, 39 aa, Artificial Sequence
  Quasi-synthetic sequence derived from human genome
RRSLRPCSVLVSLLQKPRHRCRKRKPLLAIGFYLYRMNK

SEQ ID NO: 31160 - protein, 39 aa, Artificial Sequence
  Quasi-synthetic sequence derived from human genome
RRRGFGLFFFLRLHRLLLLFLVLRGTLANKLNVPQVLLP

SEQ ID NO: 31161 - protein, 39 aa, Artificial Sequence
  Quasi-synthetic sequence derived from human genome
RRRPARTLGLLLLVVLGFLVLRRLDWSTLVPLRLRHRQL

SEQ ID NO: 31162 - protein, 39 aa, Artificial Sequence
  Quasi-synthetic sequence derived from human genome
KQRLKRLRNIHYLFNTALFLIAWRLLIARSQMARNVWFF

SEQ ID NO: 31163 - protein, 39 aa, Artificial Sequence
  Quasi-synthetic sequence derived from human genome
MSFAILRIIRLVRVFRIFKLSRHSKGLQILGHTLRASMR

SEQ ID NO: 31164 - protein, 39 aa, Artificial Sequence
  Quasi-synthetic sequence derived from human genome
RRLRKNLKSLIIVHPSWFIRTVLAISRPFISVKFINKIQ

SEQ ID NO: 31165 - protein, 39 aa, Artificial Sequence
  Quasi-synthetic sequence derived from human genome
IPVFRLARRRKKILFYCHFPDLLLTKRDSFLKRLYRAPI

SEQ ID NO: 31166 - protein, 39 aa, Artificial Sequence
  Quasi-synthetic sequence derived from human genome
RRRRAMRAFRMLLYSKSTSLTFHWKLWGRHRGRRRGLAH

SEQ ID NO: 31167 - protein, 39 aa, Artificial Sequence
  Quasi-synthetic sequence derived from human genome
LLVAGVLVLLVSLGVAIHLCCRRRRARLRFMKQLRLHPL

SEQ ID NO: 31168 - protein, 39 aa, Artificial Sequence
  Quasi-synthetic sequence derived from human genome
RRPSPYWRLTWRVVSPLLLTIFVAYIILLFWKPLRYKAW

SEQ ID NO: 31169 - protein, 39 aa, Artificial Sequence
  Quasi-synthetic sequence derived from human genome
KHFLRMLIQVCLYFYCKFLWRCLKFVMRKLTGRCELQRI

SEQ ID NO: 31170 - protein, 39 aa, Artificial Sequence
  Quasi-synthetic sequence derived from human genome
LKPFLLGCPRFVVIDNCIALKKVASRLKKKRKKKNIKTK

SEQ ID NO: 31171 - protein, 39 aa, Artificial Sequence
  Quasi-synthetic sequence derived from human genome
KKVLNLLKGAFPARLKKVLIVGAPIWFRVPYSIISLLLK

SEQ ID NO: 31172 - protein, 39 aa, Artificial Sequence
  Quasi-synthetic sequence derived from human genome
RWLRIKLWISTVALALVPFLLLIPKFARWFSVPWKVIFV

SEQ ID NO: 31173 - protein, 39 aa, Artificial Sequence
  Quasi-synthetic sequence derived from human genome
FRNLRLPKRLRVVYFLARTRLAQRLIMAGTVVWIGILVY

SEQ ID NO: 31174 - protein, 39 aa, Artificial Sequence
  Quasi-synthetic sequence derived from human genome
ISVVKILRVLRVLRPLRAINRAKGLKHVVQCVFVAIRTI

SEQ ID NO: 31175 - protein, 39 aa, Artificial Sequence
  Quasi-synthetic sequence derived from human genome
INVVKILRVLRVLRPLRAINRAKGLKHVVQCVFVAIRTI

SEQ ID NO: 31176 - protein, 39 aa, Artificial Sequence
  Quasi-synthetic sequence derived from human genome
KPSRPKTSFNWFVNPLKTFVFFIWRRYWRTLVLLLLVLL

SEQ ID NO: 31177 - protein, 39 aa, Artificial Sequence
  Quasi-synthetic sequence derived from human genome
CRCRGRKRCIKKFSIQRFPKILVLHLKRFSESRIRTSKL

SEQ ID NO: 31178 - protein, 39 aa, Artificial Sequence
  Quasi-synthetic sequence derived from human genome
PVIKKIALREIRMLKQLKHPNLVNLLEVFRRKRRLHLVF

SEQ ID NO: 31179 - protein, 39 aa, Artificial Sequence
  Quasi-synthetic sequence derived from human genome
LLLVPLLVLALASYRRLCLRLRLADCLVPYSRALYRRRR

SEQ ID NO: 31180 - protein, 39 aa, Artificial Sequence
  Quasi-synthetic sequence derived from human genome
YKTMKFILWRRFRWAIILFIILFILLLFLAIFIYAFPNY

SEQ ID NO: 31181 - protein, 39 aa, Artificial Sequence
  Quasi-synthetic sequence derived from human genome
ALRPLVKPKIVKKRTKKFIRHQSDRYVKIKRNWRKPRGI

SEQ ID NO: 31182 - protein, 39 aa, Artificial Sequence
  Quasi-synthetic sequence derived from human genome
CLYLIYNLLQAVFFVLFVLSVHYLWKKWKKHQKKLKKQA

SEQ ID NO: 31183 - protein, 39 aa, Artificial Sequence
  Quasi-synthetic sequence derived from human genome
KVRHTKKKTFKCIKCSKSFFMLSCLIRHKRIHIRQNIYK

SEQ ID NO: 31184 - protein, 39 aa, Artificial Sequence
  Quasi-synthetic sequence derived from human genome
RYLRASSNRNFLLTMRPFLKRAILVLSYVLVILYFRLWI

SEQ ID NO: 31185 - protein, 39 aa, Artificial Sequence
  Quasi-synthetic sequence derived from human genome
CWKFFMARVRLQLKIILCFSPVGRTLRVRARKFPAIVNC

SEQ ID NO: 31186 - protein, 39 aa, Artificial Sequence
  Quasi-synthetic sequence derived from human genome
RQWLAIQKLRSKIHKKVDRKASKGRKLRFHVLSKLLSFM

SEQ ID NO: 31187 - protein, 39 aa, Artificial Sequence
  Quasi-synthetic sequence derived from human genome
RRLRKNLKSFIIVHPSWFIRTILAVTRPFISSKFSSKIK

SEQ ID NO: 31188 - protein, 39 aa, Artificial Sequence
  Quasi-synthetic sequence derived from human genome
TVTLIILAVVGGVIGLLILILLIKKLIIFILKKTREKKK

SEQ ID NO: 31189 - protein, 39 aa, Artificial Sequence
  Quasi-synthetic sequence derived from human genome
RRKLKFFFMNPCEKFWARGRKPWKLAIQILKIAMVTIQL

SEQ ID NO: 31190 - protein, 39 aa, Artificial Sequence
  Quasi-synthetic sequence derived from human genome
SLDVIAFLLACVATVIFIITKFCLFCFRKLAKKGKKKKR

SEQ ID NO: 31191 - protein, 39 aa, Artificial Sequence
  Quasi-synthetic sequence derived from human genome
VIIFFAFVLLLSGALAYCLALQLYVRRRKKLPSVLLFKK

SEQ ID NO: 31192 - protein, 39 aa, Artificial Sequence
  Quasi-synthetic sequence derived from human genome
LILLVVRRLRVPKTPAPDGPRYRFRKRDKVLFYGRKIMR

SEQ ID NO: 31193 - protein, 39 aa, Artificial Sequence
  Quasi-synthetic sequence derived from human genome
FINLSFLRLFRAARLIKLLRQGYTIRILLWTFVQSFKAL

SEQ ID NO: 31194 - protein, 39 aa, Artificial Sequence
  Quasi-synthetic sequence derived from human genome
FLKVIGKGSFGKVLLAKRKLDGKFYAVKVLQKKIVLNRK

SEQ ID NO: 31195 - protein, 39 aa, Artificial Sequence
  Quasi-synthetic sequence derived from human genome
RFKKGKIVLLFSLLCWVLFNLGIGFVKPATLRCVPKIRP

SEQ ID NO: 31196 - protein, 39 aa, Artificial Sequence
  Quasi-synthetic sequence derived from human genome
PKIAAFLPARQLWKWFGKPTQRRGMKGKARKLFYKAIVR

SEQ ID NO: 31197 - protein, 39 aa, Artificial Sequence
  Quasi-synthetic sequence derived from human genome
ARWRCRRLRAIYTIMRWFRRHKVRAHLAELQRRFQAARQ

SEQ ID NO: 31198 - protein, 39 aa, Artificial Sequence
  Quasi-synthetic sequence derived from human genome
ATKKLDLWRLPPILIIHLKRFQFVNGRWIKSQKIVKFPR

SEQ ID NO: 31199 - protein, 39 aa, Artificial Sequence
  Quasi-synthetic sequence derived from human genome
RVSYQKLLKYYVLNALKHRPPKAQKKRYLFRSFKATKFF

SEQ ID NO: 31200 - protein, 39 aa, Artificial Sequence
  Quasi-synthetic sequence derived from human genome
VMNLIILVNLIHLFIFRKSNFIFDKLHKVGIKTRRQWRR

SEQ ID NO: 31201 - protein, 39 aa, Artificial Sequence
  Quasi-synthetic sequence derived from human genome
KKSAKLYIPYIILTIIILTIVGFIWLLKVNGCRKYKLNK

SEQ ID NO: 31202 - protein, 39 aa, Artificial Sequence
  Quasi-synthetic sequence derived from human genome
RVVKIAGISAGILVFILLLLVVILIVKKSKLAKKRKDAM

SEQ ID NO: 31203 - protein, 39 aa, Artificial Sequence
  Quasi-synthetic sequence derived from human genome
RSRKLHQQYRLARQRIIQFQARCRAYLVRKAFRHRLWAV

SEQ ID NO: 31204 - protein, 39 aa, Artificial Sequence
  Quasi-synthetic sequence derived from human genome
LILSSIFGLLLLVLFILFLTWCRVQKQKHLPLRVSTRRR

SEQ ID NO: 31205 - protein, 39 aa, Artificial Sequence
  Quasi-synthetic sequence derived from human genome
FFNSKVALFAAVGAGCVIFLLIIIFLTVLLLKLRKRHRK

SEQ ID NO: 31206 - protein, 39 aa, Artificial Sequence
  Quasi-synthetic sequence derived from human genome
RAMLYSRAVRNLKKKLLPWQRRGLLRAQGLRGWKARRAT

SEQ ID NO: 31207 - protein, 39 aa, Artificial Sequence
  Quasi-synthetic sequence derived from human genome
LPTLKAAVIVAFAFTTLLIACLLLRVFRSGKRLKKTRKY

SEQ ID NO: 31208 - protein, 39 aa, Artificial Sequence
  Quasi-synthetic sequence derived from human genome
LAKLKLFRHYYVLIVCYIYFTRIIAFLLKLAVPFQWKWL

SEQ ID NO: 31209 - protein, 39 aa, Artificial Sequence
  Quasi-synthetic sequence derived from human genome
FLAFKNDISFWKKKKSMIGMSTKLWKVKKALKMTIFWRG

SEQ ID NO: 31210 - protein, 39 aa, Artificial Sequence
  Quasi-synthetic sequence derived from human genome
KLRLCFLVMAYGTTIFHPLLYAFTRQKFQKVLKSKMKKR

SEQ ID NO: 31211 - protein, 39 aa, Artificial Sequence
  Quasi-synthetic sequence derived from human genome
LLLLLVVCGIGCVWHWKHRVATRFTLPRFLQRRSSRRKV

SEQ ID NO: 31212 - protein, 39 aa, Artificial Sequence
  Quasi-synthetic sequence derived from human genome
KVVQFFRILRIFKLIAPKLLQIIDKRMSHQKTFWYGILK

SEQ ID NO: 31213 - protein, 39 aa, Artificial Sequence
  Quasi-synthetic sequence derived from human genome
LKKKLFKRRRVLNRERRLRHRVVGAVIDQGLITRHHLKK

SEQ ID NO: 31214 - protein, 39 aa, Artificial Sequence
  Quasi-synthetic sequence derived from human genome
ARCRAYLVRKAFRHRLWAVLTVQAYARGMIARRLHQRLR

SEQ ID NO: 31215 - protein, 39 aa, Artificial Sequence
  Quasi-synthetic sequence derived from human genome
FLLMQTHSFAIYHQSLFRILKVFKSLRALRAIRVLRRLS

SEQ ID NO: 31216 - protein, 39 aa, Artificial Sequence
  Quasi-synthetic sequence derived from human genome
IALFLILLATAVILGSAVLLFHFCIFHRRKMKAIRRSLK

SEQ ID NO: 31217 - protein, 39 aa, Artificial Sequence
  Quasi-synthetic sequence derived from human genome
HKPLREWFVIVIMATICFILLILSLICKIKLGPVRRKLK

SEQ ID NO: 31218 - protein, 39 aa, Artificial Sequence
  Quasi-synthetic sequence derived from human genome
RRRRSRSVVRRRSFSISPVRLRRSRTPLRRRFSRSPIRR

SEQ ID NO: 31219 - protein, 39 aa, Artificial Sequence
  Quasi-synthetic sequence derived from human genome
WLRRGVLLVRAPPACLQVLRDAWRRRALRPPRGFRIRAV

SEQ ID NO: 31220 - protein, 39 aa, Artificial Sequence
  Quasi-synthetic sequence derived from human genome
KRVRGWLARTHYKRSMHAIIYLQCCFRRMMAKRELKKLK

SEQ ID NO: 31221 - protein, 39 aa, Artificial Sequence
  Quasi-synthetic sequence derived from human genome
LRLFRAARLIKLLRQGYTIRILLWTFVQSFKALPYVCLL

SEQ ID NO: 31222 - protein, 39 aa, Artificial Sequence
  Quasi-synthetic sequence derived from human genome
IKTLLRCPSKKKYKAIRLIFVIMAVFFIFWTPYNVAILL

SEQ ID NO: 31223 - protein, 39 aa, Artificial Sequence
  Quasi-synthetic sequence derived from human genome
RKWHKASNYIFVAIFWIVFLLLIVFYTAITKKIFKSHLK

SEQ ID NO: 31224 - protein, 39 aa, Artificial Sequence
  Quasi-synthetic sequence derived from human genome
RRPWGAWLSARLWKWLKSPRSWRLGLALLLGGALLFWVL

SEQ ID NO: 31225 - protein, 39 aa, Artificial Sequence
  Quasi-synthetic sequence derived from human genome
FLLCAIAMFLVIFPMFTFPKKLPPRHKKKKKKKFSVDAV

SEQ ID NO: 31226 - protein, 39 aa, Artificial Sequence
  Quasi-synthetic sequence derived from human genome
VFRQPLSSLWRSLVPLFCWLRATFWLLATKRRKQQLVLR

SEQ ID NO: 31227 - protein, 39 aa, Artificial Sequence
  Quasi-synthetic sequence derived from human genome
KRFKVMKPKVLRSWCRQILKGLLFLHTRTPPIIHRDLKC

SEQ ID NO: 31228 - protein, 39 aa, Artificial Sequence
  Quasi-synthetic sequence derived from human genome
RCYRLAVRTVIRAFVKCTKARYLKKKNMRTLWINRITAA

SEQ ID NO: 31229 - protein, 39 aa, Artificial Sequence
  Quasi-synthetic sequence derived from human genome
IYNTIRRKTKDAFYKNIVKKGYLLKKGKGKRWKNLYFIL

SEQ ID NO: 31230 - protein, 39 aa, Artificial Sequence
  Quasi-synthetic sequence derived from human genome
RKLQKNLKTGSFLNRLGKLLLHLFMVLCLTLFLNNIIKK

SEQ ID NO: 31231 - protein, 39 aa, Artificial Sequence
  Quasi-synthetic sequence derived from human genome
FFLFLLSATFNASFLLKLQKWTQKKEKGKKLSRMKLLLK

SEQ ID NO: 31232 - protein, 39 aa, Artificial Sequence
  Quasi-synthetic sequence derived from human genome
RYFLWHTYRWLLLKLLLLLLLLLLLALFLYSVPGYLVKK

SEQ ID NO: 31233 - protein, 39 aa, Artificial Sequence
  Quasi-synthetic sequence derived from human genome
KPSVFRCIALRWVRLLGFAIVYGTIILKLYRVLQLFLSR

SEQ ID NO: 31234 - protein, 39 aa, Artificial Sequence
  Quasi-synthetic sequence derived from human genome
FLKLFRAARLIKLLRQGYTIRILLWTFVQSFKALPYVCL

SEQ ID NO: 31235 - protein, 39 aa, Artificial Sequence
  Quasi-synthetic sequence derived from human genome
MRRKLKFFFMNPCEKFWARGRKPWKLAIQILKIAMVTIQ

SEQ ID NO: 31236 - protein, 39 aa, Artificial Sequence
  Quasi-synthetic sequence derived from human genome
VNIPLFRRFGRQRKIGGRGRIISPYRTPVLRRHRYSIFR

SEQ ID NO: 31237 - protein, 39 aa, Artificial Sequence
  Quasi-synthetic sequence derived from human genome
LFFLLSLGIILFCYVEILRTLFRSRSKRRHRTVKLIFAI

SEQ ID NO: 31238 - protein, 39 aa, Artificial Sequence
  Quasi-synthetic sequence derived from human genome
SIISAVVGILLVVVLGVVFGILIKRRQQKIRKYTMRRLL

SEQ ID NO: 31239 - protein, 39 aa, Artificial Sequence
  Quasi-synthetic sequence derived from human genome
LRALRLLRIFKVTKYWASLRNLVVSLLNSMKSIISLLFL

SEQ ID NO: 31240 - protein, 39 aa, Artificial Sequence
  Quasi-synthetic sequence derived from human genome
KLSRALRYYYNKRILHKTKGKRFTYKFNFNKLVLVNYPF

SEQ ID NO: 31241 - protein, 39 aa, Artificial Sequence
  Quasi-synthetic sequence derived from human genome
LRWAGYRPGPVRRRGKVELIKFVRVQWRRPQVEWRRRRW

SEQ ID NO: 31242 - protein, 39 aa, Artificial Sequence
  Quasi-synthetic sequence derived from human genome
IFRLVQASGQKAPRPAARRKARRLLKTVLMILLAFLVCW

SEQ ID NO: 31243 - protein, 39 aa, Artificial Sequence
  Quasi-synthetic sequence derived from human genome
RARRRRRRRRRRDLLLSQLCFLASVALLLWSLSSLREQK

SEQ ID NO: 31244 - protein, 39 aa, Artificial Sequence
  Quasi-synthetic sequence derived from human genome
LKIKLAVRMDKPQNMKHSGYLWAIGKNVWKRWKKRFFVL

SEQ ID NO: 31245 - protein, 39 aa, Artificial Sequence
  Quasi-synthetic sequence derived from human genome
LRALRLLRIFKITKYWASLRNLVVSLMSSMKSIISLLFL

SEQ ID NO: 31246 - protein, 39 aa, Artificial Sequence
  Quasi-synthetic sequence derived from human genome
FRIKRFLAKKQKQNRPIPQWIRMKTGNKIRYNSKRRHWR

SEQ ID NO: 31247 - protein, 39 aa, Artificial Sequence
  Quasi-synthetic sequence derived from human genome
RPGATGRRRRRLRRRPRGLRCSRLPPPPPLPLLLGLLLA

SEQ ID NO: 31248 - protein, 39 aa, Artificial Sequence
  Quasi-synthetic sequence derived from human genome
YRHWQIPLGRRFRSLKMWFVFRMYGVKGLQAYIRKHVQL

SEQ ID NO: 31249 - protein, 39 aa, Artificial Sequence
  Quasi-synthetic sequence derived from human genome
LKRATLKNLRKQYRNVKKMTAKELVKVLFSFFWMLFVGL

SEQ ID NO: 31250 - protein, 39 aa, Artificial Sequence
  Quasi-synthetic sequence derived from human genome
IFCKKCILRWLARQKTCPCCRKEVKRKKVVHMNKLRKTI

SEQ ID NO: 31251 - protein, 39 aa, Artificial Sequence
  Quasi-synthetic sequence derived from human genome
MSLAILRVIRLVRVFRIFKLSRHSKGLQILGQTLKASMR

SEQ ID NO: 31252 - protein, 39 aa, Artificial Sequence
  Quasi-synthetic sequence derived from human genome
MSLAILRVIRLVRVFRIFKLSRHSKGLQILGKTLQASMR

SEQ ID NO: 31253 - protein, 39 aa, Artificial Sequence
  Quasi-synthetic sequence derived from human genome
TLRFLKLRRERRALLCLLLVLGIAFIPIILEKIMYKVTR

SEQ ID NO: 31254 - protein, 39 aa, Artificial Sequence
  Quasi-synthetic sequence derived from human genome
FSSTLVLIVLVTLIFCLIVLSLSTFHIHKRRMKKRKMQR

SEQ ID NO: 31255 - protein, 39 aa, Artificial Sequence
  Quasi-synthetic sequence derived from human genome
WFRGNMQKKCYGKIKASVLLIQAFVRGWKARKNYRKYFR

SEQ ID NO: 31256 - protein, 39 aa, Artificial Sequence
  Quasi-synthetic sequence derived from human genome
RKQIKRKAPRGFLKRVFKRKKPQLRLEKSGDLLVRFHPF

SEQ ID NO: 31257 - protein, 39 aa, Artificial Sequence
  Quasi-synthetic sequence derived from human genome
LRGFLARNRYRKILREHKAVIIQKRVRGWLARTHYKRSM

SEQ ID NO: 31258 - protein, 39 aa, Artificial Sequence
  Quasi-synthetic sequence derived from human genome
RQRRQKLLLAQLHHRKRVKAAGQIQAWWRGVLVRRTLLV

SEQ ID NO: 31259 - protein, 39 aa, Artificial Sequence
  Quasi-synthetic sequence derived from human genome
KFSPVAKKLFVVTAVSAISVIFLAHHFKRKRGKKKGKIL

SEQ ID NO: 31260 - protein, 39 aa, Artificial Sequence
  Quasi-synthetic sequence derived from human genome
RKYRATICAKHKLYQFLHLRKAAITIQSSYRRLMVKKKL

SEQ ID NO: 31261 - protein, 39 aa, Artificial Sequence
  Quasi-synthetic sequence derived from human genome
LLRLKAFILFGKLARVVGMSKKHFFKGEVKKAWIPLMLH

SEQ ID NO: 31262 - protein, 39 aa, Artificial Sequence
  Quasi-synthetic sequence derived from human genome
IRARRKTARMLMIVLLVFAICYLPISILNVLKRVFGMFA

SEQ ID NO: 31263 - protein, 39 aa, Artificial Sequence
  Quasi-synthetic sequence derived from human genome
FVWYTPPTFMIAVFLPIVVLIFKSILFLPCLRKKILKIR

SEQ ID NO: 31264 - protein, 39 aa, Artificial Sequence
  Quasi-synthetic sequence derived from human genome
RLPIRMAKALGKRTAKYRWFAVLYLLVCFLLLPSLVFGI

SEQ ID NO: 31265 - protein, 39 aa, Artificial Sequence
  Quasi-synthetic sequence derived from human genome
FPPLYYRRAHRRFVTKKALCIRVFQETQKLKKRRRALKA

SEQ ID NO: 31266 - protein, 39 aa, Artificial Sequence
  Quasi-synthetic sequence derived from human genome
FIFYLLASVLLSLLLILKAGRRWNKYFKSRRPLFTGGLI

SEQ ID NO: 31267 - protein, 39 aa, Artificial Sequence
  Quasi-synthetic sequence derived from human genome
FLWFTNPCKTMKFIVWRRFKWVIIGLLFLLILLLFVAVL

SEQ ID NO: 31268 - protein, 39 aa, Artificial Sequence
  Quasi-synthetic sequence derived from human genome
SRVSVRTWWRWLTFWRRLQSAFLKNRSLRTKSSLWRRSS

SEQ ID NO: 31269 - protein, 39 aa, Artificial Sequence
  Quasi-synthetic sequence derived from human genome
KVLRGYRYRKEFLRQRRAAVTLQAWWRGYCNRRNFKLIL

SEQ ID NO: 31270 - protein, 39 aa, Artificial Sequence
  Quasi-synthetic sequence derived from human genome
IVKQGYVKIRSRKLGIFRRCWLVFKKASSKGPRRLEKFP

SEQ ID NO: 31271 - protein, 39 aa, Artificial Sequence
  Quasi-synthetic sequence derived from human genome
PKQNIFYFLYGKTRSRIPLLRKRRFQLCRCMNPRARKNR

SEQ ID NO: 31272 - protein, 39 aa, Artificial Sequence
  Quasi-synthetic sequence derived from human genome
LHLVLRLRGGAKKRKKKSYTTPKKNKHKRKKVKLAVLKY

SEQ ID NO: 31273 - protein, 39 aa, Artificial Sequence
  Quasi-synthetic sequence derived from human genome
LRALRLLRIFKVTKYWSSLRNLVVSLLNSMKSIISLLFL

SEQ ID NO: 31274 - protein, 39 aa, Artificial Sequence
  Quasi-synthetic sequence derived from human genome
FRAFRRANARCFWNARLARAASRLAFQGWLRRGVLLVRA

SEQ ID NO: 31275 - protein, 39 aa, Artificial Sequence
  Quasi-synthetic sequence derived from human genome
FLFAFFIFIMSLLLISGQRPVNLTMRRKLRKHNCLQRRC

SEQ ID NO: 31276 - protein, 39 aa, Artificial Sequence
  Quasi-synthetic sequence derived from human genome
YLGLARKKSGILLLTLVSFLIFILFIIVQLFIMKLRKAH

SEQ ID NO: 31277 - protein, 39 aa, Artificial Sequence
  Quasi-synthetic sequence derived from human genome
HKMLRLRLPNLKMVRLRVSFSAVVFKAVSDICKILNIRR

SEQ ID NO: 31278 - protein, 39 aa, Artificial Sequence
  Quasi-synthetic sequence derived from human genome
LLERAGLVLRLLRALRVLYVMRLARHSLGLRSLGLTMRR

SEQ ID NO: 31279 - protein, 39 aa, Artificial Sequence
  Quasi-synthetic sequence derived from human genome
KGQKKKKIVKYGMGGLIILFLIAIIWFPLLFMSLVRSVV

SEQ ID NO: 31280 - protein, 39 aa, Artificial Sequence
  Quasi-synthetic sequence derived from human genome
WKTWIFRKTYIGWKTWIFSGRCGLTGRPGFGGRRRFFWK

SEQ ID NO: 31281 - protein, 39 aa, Artificial Sequence
  Quasi-synthetic sequence derived from human genome
VFHFLVPMIIVIFCYLRIWILVLQVRQRVKPDRKPKLKP

SEQ ID NO: 31282 - protein, 39 aa, Artificial Sequence
  Quasi-synthetic sequence derived from human genome
LKRFKVMKPKVLRSWCRQILKGLQFLHTRTPPIIHRDLK

SEQ ID NO: 31283 - protein, 39 aa, Artificial Sequence
  Quasi-synthetic sequence derived from human genome
KRAIRIILSFFFLFLLYFLAFLIASFGNFLPKTKMAKMI

SEQ ID NO: 31284 - protein, 39 aa, Artificial Sequence
  Quasi-synthetic sequence derived from human genome
LRVLRVLRPLKTIKRLPKLKAVFDCVVNSLKNVFNILIV

SEQ ID NO: 31285 - protein, 39 aa, Artificial Sequence
  Quasi-synthetic sequence derived from human genome
RYLRVKLTVRYKRVTTHRRIWLALGLCWLVSFLVGLTPM

SEQ ID NO: 31286 - protein, 39 aa, Artificial Sequence
  Quasi-synthetic sequence derived from human genome
RWLLRTKRLHWSRLLFLLGMLIIGSTYQHLRRPRGLSSL

SEQ ID NO: 31287 - protein, 39 aa, Artificial Sequence
  Quasi-synthetic sequence derived from human genome
KSLRVLRVLRPLKTIKRLPKLKAVFDCVVNSLKNVLNIL

SEQ ID NO: 31288 - protein, 39 aa, Artificial Sequence
  Quasi-synthetic sequence derived from human genome
AVPLSVLILGLLIMFITIVFCAAGIVVLVLHRRRRYKKK

SEQ ID NO: 31289 - protein, 39 aa, Artificial Sequence
  Quasi-synthetic sequence derived from human genome
FFIFLKILKLLISKLKAHQMCFRDYKYRLAKSTLVLIPL

SEQ ID NO: 31290 - protein, 39 aa, Artificial Sequence
  Quasi-synthetic sequence derived from human genome
RPKKRAKTITFSKNAVISKRGGKLCLLIRVANLRKSLLI

SEQ ID NO: 31291 - protein, 39 aa, Artificial Sequence
  Quasi-synthetic sequence derived from human genome
ILQRVLLLFRAAQCSFPVAQWYILQLRWARKVMQKIRMK

SEQ ID NO: 31292 - protein, 39 aa, Artificial Sequence
  Quasi-synthetic sequence derived from human genome
RSGLLTVMVWVSSIFFFLPVFCLTVLYSLIGRKLWRRRR

SEQ ID NO: 31293 - protein, 39 aa, Artificial Sequence
  Quasi-synthetic sequence derived from human genome
KRFKVMKIKVLRSWCRQILKGLQFLHTRTPPIIHRDLKC

SEQ ID NO: 31294 - protein, 39 aa, Artificial Sequence
  Quasi-synthetic sequence derived from human genome
LMMYEKLSMIRFRYRILRSQHFRTKSKVCKLRKAQRSWV

SEQ ID NO: 31295 - protein, 39 aa, Artificial Sequence
  Quasi-synthetic sequence derived from human genome
RRKFLQMKRRKYGFIYKTHLFGRPTVRVMGADNVRRILL

SEQ ID NO: 31296 - protein, 39 aa, Artificial Sequence
  Quasi-synthetic sequence derived from human genome
FMVIRFPGRRGYGRLRPRARSLSKASTAINWLTKKFLLK

SEQ ID NO: 31297 - protein, 39 aa, Artificial Sequence
  Quasi-synthetic sequence derived from human genome
LLRFLRLCRSFYITCRRLRCFPQPPRRNWLLGHLGMYLP

SEQ ID NO: 31298 - protein, 39 aa, Artificial Sequence
  Quasi-synthetic sequence derived from human genome
LRRRLKYFFMSPCDKFRAKGRKPCKLMLQVVKILVVTVQ

SEQ ID NO: 31299 - protein, 39 aa, Artificial Sequence
  Quasi-synthetic sequence derived from human genome
KKRVRFTKRKQKVPGFPKRFTVKPVVLGFPYFHSGRHFW

SEQ ID NO: 31300 - protein, 39 aa, Artificial Sequence
  Quasi-synthetic sequence derived from human genome
KYKKNLKALYVVHPTSFIKVLWNILKPLISHKFGKKVIY

SEQ ID NO: 31301 - protein, 39 aa, Artificial Sequence
  Quasi-synthetic sequence derived from human genome
RARGYLARQRYQQMRRSLVKFRSLVHAYVSRRRYLKLRA

SEQ ID NO: 31302 - protein, 39 aa, Artificial Sequence
  Quasi-synthetic sequence derived from human genome
CWLLLVLVLVLLVSPRGCRARRGLRGLLMAHSQRLLFRI

SEQ ID NO: 31303 - protein, 39 aa, Artificial Sequence
  Quasi-synthetic sequence derived from human genome
VRGYLARRRIRLWHRGAMVIQATWRGYRVRRNLAHLCRA

SEQ ID NO: 31304 - protein, 39 aa, Artificial Sequence
  Quasi-synthetic sequence derived from human genome
IPVFAFLGAMVVLAFFVVQINKAKSRPKRRKPRVKRPQL

SEQ ID NO: 31305 - protein, 39 aa, Artificial Sequence
  Quasi-synthetic sequence derived from human genome
RSKKKKKKKKKRQCFAFLIYFRLGIKMGKQGIINKEGYL

SEQ ID NO: 31306 - protein, 39 aa, Artificial Sequence
  Quasi-synthetic sequence derived from human genome
AMWRRYRAKKYLCKVKAACKIQAWYRCWRAHKEYLAILK

SEQ ID NO: 31307 - protein, 39 aa, Artificial Sequence
  Quasi-synthetic sequence derived from human genome
KKAVWHKLLSKQRKRAVVACFRMAPLYNLPRHRAVNLFL

SEQ ID NO: 31308 - protein, 39 aa, Artificial Sequence
  Quasi-synthetic sequence derived from human genome
LRIIRFLPLFKIIVPILIRIADVQIKKRLSLMYSITKGY

SEQ ID NO: 31309 - protein, 39 aa, Artificial Sequence
  Quasi-synthetic sequence derived from human genome
RKAPLWLRAKFQRLLFKLGCYIQKNCGKFLVVGLLIFGA

SEQ ID NO: 31310 - protein, 39 aa, Artificial Sequence
  Quasi-synthetic sequence derived from human genome
RWKKVQWCSLSVIKLKNKIKYRAEACIKMQKTIRMWLCK

SEQ ID NO: 31311 - protein, 39 aa, Artificial Sequence
  Quasi-synthetic sequence derived from human genome
NGNKKIWWIIRGPMMLCVTVNFFIFLKILKLLISKLKAH

SEQ ID NO: 31312 - protein, 39 aa, Artificial Sequence
  Quasi-synthetic sequence derived from human genome
RLRKNLKSLIIVHPSWFIRTLLAVTRPFISSKFSQKIRY

SEQ ID NO: 31313 - protein, 39 aa, Artificial Sequence
  Quasi-synthetic sequence derived from human genome
PVVKKIALREIRMLKQLKHPNLVNLIEVFRRKRKMHLVF

SEQ ID NO: 31314 - protein, 39 aa, Artificial Sequence
  Quasi-synthetic sequence derived from human genome
VAKKTSFKDCIPRSFRRHIRQHSALTRLRLRNVFRRFLR

SEQ ID NO: 31315 - protein, 39 aa, Artificial Sequence
  Quasi-synthetic sequence derived from human genome
YVQMRLKKHRWYKKILKSRDPIIFSVGWRRFQTIPLYYI

SEQ ID NO: 31316 - protein, 39 aa, Artificial Sequence
  Quasi-synthetic sequence derived from human genome
RVLRMMRIFWVIKLARHFIGLQTLGLTLKRCYREMVMLL

SEQ ID NO: 31317 - protein, 39 aa, Artificial Sequence
  Quasi-synthetic sequence derived from human genome
RWARPFYLAFVFCLALGLLQAIKLYLRRQRLLRDLRPFP

SEQ ID NO: 31318 - protein, 39 aa, Artificial Sequence
  Quasi-synthetic sequence derived from human genome
SKQNIFHFLYGKNRSRIPLLRKRWFQLGRSMNPRARKKR

SEQ ID NO: 31319 - protein, 39 aa, Artificial Sequence
  Quasi-synthetic sequence derived from human genome
RLLRLIILIRIFHLLHQKRQLEKLMRRLVSENKRRYTRD

SEQ ID NO: 31320 - protein, 39 aa, Artificial Sequence
  Quasi-synthetic sequence derived from human genome
KIVNFSRLIFHHLKRKAKSVVLVIVLGSLFFLVCHLVMK

SEQ ID NO: 31321 - protein, 39 aa, Artificial Sequence
  Quasi-synthetic sequence derived from human genome
GRQVTGRIRASLVLILKTIRRRLPFSKWRLAFRFAGPHA

SEQ ID NO: 31322 - protein, 39 aa, Artificial Sequence
  Quasi-synthetic sequence derived from human genome
MMFVRNDCKVFRFCKSKCHKNFKKKRNPRKVRWTKAFRK

SEQ ID NO: 31323 - protein, 39 aa, Artificial Sequence
  Quasi-synthetic sequence derived from human genome
KLSRALRYYYNKRILHKTKGKRFTYKFNFSKVVLVNYPL

SEQ ID NO: 31324 - protein, 39 aa, Artificial Sequence
  Quasi-synthetic sequence derived from human genome
KGIQCFLVVVALLCVPWMLLFKPLVLRRQYLRRKHLGTL

SEQ ID NO: 31325 - protein, 39 aa, Artificial Sequence
  Quasi-synthetic sequence derived from human genome
KILGVLRVLRLLRTLRPLRVISRAPGLKLVVETLISSLR

SEQ ID NO: 31326 - protein, 39 aa, Artificial Sequence
  Quasi-synthetic sequence derived from human genome
KFIRIFQLSNNIRSVVLRHCKKRQSHLRLTLKNNVFLFI

SEQ ID NO: 31327 - protein, 39 aa, Artificial Sequence
  Quasi-synthetic sequence derived from human genome
CLHVVLSSKVCRGYLVKMGGKIKSWKKRWFVFDRLKRTL

SEQ ID NO: 31328 - protein, 39 aa, Artificial Sequence
  Quasi-synthetic sequence derived from human genome
VSVIIALRRAVKRHRERRERQKRVFRMSLLIISTFLLCW

SEQ ID NO: 31329 - protein, 39 aa, Artificial Sequence
  Quasi-synthetic sequence derived from human genome
FKTCKEYLRPLKKFLRKLHLPRDLPQKKKLKYMKQSLVV

SEQ ID NO: 31330 - protein, 39 aa, Artificial Sequence
  Quasi-synthetic sequence derived from human genome
RHGFRCQFANGIFQLWFHFKRYRYRRPGPCWRPIRHCRR

SEQ ID NO: 31331 - protein, 39 aa, Artificial Sequence
  Quasi-synthetic sequence derived from human genome
FYTLVIPLLNPFIYSLRNKEVINIMKKIMKKRKFCHILK

SEQ ID NO: 31332 - protein, 39 aa, Artificial Sequence
  Quasi-synthetic sequence derived from human genome
KRLPVKRAAVQFLNNAWGIQKKQNAKRFKRRWMVRKMKT

SEQ ID NO: 31333 - protein, 39 aa, Artificial Sequence
  Quasi-synthetic sequence derived from human genome
GCRLSRALLTAVTNVLIFFWCLAFLWGLLILLKYRWRKL

SEQ ID NO: 31334 - protein, 39 aa, Artificial Sequence
  Quasi-synthetic sequence derived from human genome
AIRIRILCCLTFLVKVKSKALLKNRLLPPLLHTLFPIVA

SEQ ID NO: 31335 - protein, 39 aa, Artificial Sequence
  Quasi-synthetic sequence derived from human genome
AMRRIRYEFKAKNIKKKKVSIMVSVDGVKVILKKKKKKK

SEQ ID NO: 31336 - protein, 39 aa, Artificial Sequence
  Quasi-synthetic sequence derived from human genome
IKRKAPRGFLKRVFKRKKPQLRLEKSGDLLVHLNCLLFV

SEQ ID NO: 31337 - protein, 39 aa, Artificial Sequence
  Quasi-synthetic sequence derived from human genome
VRIKTSIFSLFRAPKLRMRVFGLCFVRFAITVPFYGLIL

SEQ ID NO: 31338 - protein, 39 aa, Artificial Sequence
  Quasi-synthetic sequence derived from human genome
MPGRLLRGLWQRWRRYKYRFVPWIALNLSHNPRTLRYVP

SEQ ID NO: 31339 - protein, 39 aa, Artificial Sequence
  Quasi-synthetic sequence derived from human genome
KILGVLRVLRLLRTLRPLRVISRAPGLKLVVETLISSLK

SEQ ID NO: 31340 - protein, 39 aa, Artificial Sequence
  Quasi-synthetic sequence derived from human genome
LIKPFGARKKRSWYLTWKYKLTNQRALRRFCQTGAVLFL

SEQ ID NO: 31341 - protein, 39 aa, Artificial Sequence
  Quasi-synthetic sequence derived from human genome
RDIKTIKSLRVLRVLRPLKTIKRLPKLKAVFDCVVTSLK

SEQ ID NO: 31342 - protein, 39 aa, Artificial Sequence
  Quasi-synthetic sequence derived from human genome
IFVLVHSFLKKLLGKKLTRCLKPFENSRLRLWTKWVFAG

SEQ ID NO: 31343 - protein, 39 aa, Artificial Sequence
  Quasi-synthetic sequence derived from human genome
LKIKLAVRMDKPAHMKHSGYLYALGQKVWKRWKKRYFVL

SEQ ID NO: 31344 - protein, 39 aa, Artificial Sequence
  Quasi-synthetic sequence derived from human genome
RRKGRHMGIGKRKGTANARMPEKVTWMRRMRILRRLLRR

SEQ ID NO: 31345 - protein, 39 aa, Artificial Sequence
  Quasi-synthetic sequence derived from human genome
SRFSCTQIWVKMYGYFAGLCRRLQKFWRVTVKGFFVKKK

SEQ ID NO: 31346 - protein, 39 aa, Artificial Sequence
  Quasi-synthetic sequence derived from human genome
ALLTVNALLVLLALAAWASRWLRRKLRARRKGGAPVHVR

SEQ ID NO: 31347 - protein, 39 aa, Artificial Sequence
  Quasi-synthetic sequence derived from human genome
LLKLVHGSPLVFGEKFKLFTLVSACIPVFRLARRRKKIL

SEQ ID NO: 31348 - protein, 39 aa, Artificial Sequence
  Quasi-synthetic sequence derived from human genome
TGMVGALLLLLVVALGIGLFMRRRHIVRKRTLRRLLQER

SEQ ID NO: 31349 - protein, 39 aa, Artificial Sequence
  Quasi-synthetic sequence derived from human genome
KVGLVLRVLRALRILYVMRLARHSLGLQTLGLTARRCTR

SEQ ID NO: 31350 - protein, 39 aa, Artificial Sequence
  Quasi-synthetic sequence derived from human genome
WRVCQKSHCFRLGRQLSKALQVNCVVRKLLVQLRRLYWW

SEQ ID NO: 31351 - protein, 39 aa, Artificial Sequence
  Quasi-synthetic sequence derived from human genome
VIAGLLMFIIILLGVMLTIKRRRNAYSYSYYLKLAKKQK

SEQ ID NO: 31352 - protein, 39 aa, Artificial Sequence
  Quasi-synthetic sequence derived from human genome
FLKITSTRLLCSRLCQQLRSKRKFFGTVPISRLHRRVVI

SEQ ID NO: 31353 - protein, 39 aa, Artificial Sequence
  Quasi-synthetic sequence derived from human genome
RLIRKMFSFKVSRWMGLACFRSLAASSPSIRQKKLMHKL

SEQ ID NO: 31354 - protein, 39 aa, Artificial Sequence
  Quasi-synthetic sequence derived from human genome
LKTLLRCRNEKKRHRAVRLIFTIMIVYFLFWAPYNIVLL

SEQ ID NO: 31355 - protein, 39 aa, Artificial Sequence
  Quasi-synthetic sequence derived from human genome
RKILLLQSWFRMVLERRHFLQMKRAAVTIQACWRSYRVR

SEQ ID NO: 31356 - protein, 39 aa, Artificial Sequence
  Quasi-synthetic sequence derived from human genome
PIKHLRKSLKIIYLNSIQQLEIRNMSWPRLIRKLRCYLK

SEQ ID NO: 31357 - protein, 39 aa, Artificial Sequence
  Quasi-synthetic sequence derived from human genome
RPIGKAKPKKQSKKKVPFWNVQNKIILFTVFLFILAVIA

SEQ ID NO: 31358 - protein, 39 aa, Artificial Sequence
  Quasi-synthetic sequence derived from human genome
WVALVLHLRAHSAAKRPIACPKCERRFWRRKQLRAHLRR

SEQ ID NO: 31359 - protein, 39 aa, Artificial Sequence
  Quasi-synthetic sequence derived from human genome
RIIWHKFKQWVIPWHLNKRYNRKRFFALPYVDHFLRLER

SEQ ID NO: 31360 - protein, 39 aa, Artificial Sequence
  Quasi-synthetic sequence derived from human genome
RRKSNPKPLVLSEARKQLMIYRLPQVLRLHLKRFRWSGR

SEQ ID NO: 31361 - protein, 39 aa, Artificial Sequence
  Quasi-synthetic sequence derived from human genome
IQSWWRGTLGRRKAAKRKWAAQTIRRLIRGFVLRHAPRC

SEQ ID NO: 31362 - protein, 39 aa, Artificial Sequence
  Quasi-synthetic sequence derived from human genome
RFLCGFLVPVLIITACYLTIVCKLQRNRLAKTKKPFKII

SEQ ID NO: 31363 - protein, 39 aa, Artificial Sequence
  Quasi-synthetic sequence derived from human genome
RLRALVVIPIIFGILFAILLVLVFIKKVAKKPTNKAPHP

SEQ ID NO: 31364 - protein, 39 aa, Artificial Sequence
  Quasi-synthetic sequence derived from human genome
LLKIKNTFCLWKRLIKLKDNHCEQLRVKIRKLKNKASVL

SEQ ID NO: 31365 - protein, 39 aa, Artificial Sequence
  Quasi-synthetic sequence derived from human genome
LKKNKIHSLPDKVFIKYTKLKKIFLQHNCIRHISRKAFF

SEQ ID NO: 31366 - protein, 39 aa, Artificial Sequence
  Quasi-synthetic sequence derived from human genome
RNVKFPLPIYKSKKGWTAYKLQLFKMFPIILAILVSWLL

SEQ ID NO: 31367 - protein, 39 aa, Artificial Sequence
  Quasi-synthetic sequence derived from human genome
AAIIIQKHCKAFKIRKHYLHLRATVVSIQRRYRKLTAVR

SEQ ID NO: 31368 - protein, 39 aa, Artificial Sequence
  Quasi-synthetic sequence derived from human genome
ILKLYRVLQLFLSRTAQRSALLSSGRLLRRLGLLLLPVL

SEQ ID NO: 31369 - protein, 39 aa, Artificial Sequence
  Quasi-synthetic sequence derived from human genome
GRLQQGNMRKNVRVLSRTSKFRRLRQLLRRRKKRWQGRR

SEQ ID NO: 31370 - protein, 39 aa, Artificial Sequence
  Quasi-synthetic sequence derived from human genome
FVAGLLLGKGCRYFRYILKQDHQILGKKIKRMKRSVKKY

SEQ ID NO: 31371 - protein, 39 aa, Artificial Sequence
  Quasi-synthetic sequence derived from human genome
CWRNLFSCINLLRLLNKLTKWKHSRTMMLVVFKSAPILK

SEQ ID NO: 31372 - protein, 39 aa, Artificial Sequence
  Quasi-synthetic sequence derived from human genome
KILWKVPSFLITQVRRMNEATMLLKKQLPSVRKLLRRKT

SEQ ID NO: 31373 - protein, 39 aa, Artificial Sequence
  Quasi-synthetic sequence derived from human genome
MAKPFFRLQKFLRRTQFLLFFLTAAYLMTGSLLLLQRVR

SEQ ID NO: 31374 - protein, 39 aa, Artificial Sequence
  Quasi-synthetic sequence derived from human genome
KFYLPPTFTLTLLVPCVVILAKALFLLPCISRRLARIRR

SEQ ID NO: 31375 - protein, 39 aa, Artificial Sequence
  Quasi-synthetic sequence derived from human genome
RLVVYKIVYMFLFLLCLTLFQVYYSLWRKLLKAFWWLVV

SEQ ID NO: 31376 - protein, 39 aa, Artificial Sequence
  Quasi-synthetic sequence derived from human genome
KDLRRNKAALLFWHILLLGPIVRCLHTIRNYHKWLKNLK

SEQ ID NO: 31377 - protein, 39 aa, Artificial Sequence
  Quasi-synthetic sequence derived from human genome
RRCKKRMFKFHQMKHIFEILDKMRCLRKRSTVSFLGVLV

SEQ ID NO: 31378 - protein, 39 aa, Artificial Sequence
  Quasi-synthetic sequence derived from human genome
FKRAFVRILGCQCRGRGRRRRRRRRRLGGCAYTYRPWTR

SEQ ID NO: 31379 - protein, 39 aa, Artificial Sequence
  Quasi-synthetic sequence derived from human genome
FRLSFVYNHYLFFACILVVLLAIFLYLLRLRRIHHRQTR

SEQ ID NO: 31380 - protein, 39 aa, Artificial Sequence
  Quasi-synthetic sequence derived from human genome
ALTRSFYVILGFCGLTALYFLIRAFRLKKPQRRRYGLLA

SEQ ID NO: 31381 - protein, 39 aa, Artificial Sequence
  Quasi-synthetic sequence derived from human genome
AFKKTVNIPVLKVRKEIVSKLMRSLKRAALQRPGIRRVI

SEQ ID NO: 31382 - protein, 39 aa, Artificial Sequence
  Quasi-synthetic sequence derived from human genome
KLLRFFYSLFFPGLIVCGTLCVCLVIVLWGIRLLLQRKK

SEQ ID NO: 31383 - protein, 39 aa, Artificial Sequence
  Quasi-synthetic sequence derived from human genome
LAGVVGGVCFLGVAVLVSILAGCLLNRRRAARRRRKRLR

SEQ ID NO: 31384 - protein, 39 aa, Artificial Sequence
  Quasi-synthetic sequence derived from human genome
FSKLVLKLPWTQVGFSLLFLYLGSGGWRFIRVFIKTIRR

SEQ ID NO: 31385 - protein, 39 aa, Artificial Sequence
  Quasi-synthetic sequence derived from human genome
RKRRFQLCRCMNPRARKNRSQIVLFQKLRFQFFCSMSCR

SEQ ID NO: 31386 - protein, 39 aa, Artificial Sequence
  Quasi-synthetic sequence derived from human genome
WRRRHCCFAKMTWNAKRSLFRTHLIGVLSLVFLFAMFLF

SEQ ID NO: 31387 - protein, 39 aa, Artificial Sequence
  Quasi-synthetic sequence derived from human genome
RRRQGWLKEIRKLQKSTHLLIRKLPFSRLAREICVKFTR

SEQ ID NO: 31388 - protein, 39 aa, Artificial Sequence
  Quasi-synthetic sequence derived from human genome
LKRRYSFRLHIGRNIARPWKLIYYRAKKMFDVNNYKGRY

SEQ ID NO: 31389 - protein, 39 aa, Artificial Sequence
  Quasi-synthetic sequence derived from human genome
TSLAILRVIRLVRVFRIFKLSRHSKGLQILGQTLKASMR

SEQ ID NO: 31390 - protein, 39 aa, Artificial Sequence
  Quasi-synthetic sequence derived from human genome
KYLICTRYKWLIIKIVLALLGLLMLGLFLYSLPGYMVKK

SEQ ID NO: 31391 - protein, 39 aa, Artificial Sequence
  Quasi-synthetic sequence derived from human genome
CWRNLFSCINLLRILNKLTKWKHSRTMMLVVFKSAPILK

SEQ ID NO: 31392 - protein, 39 aa, Artificial Sequence
  Quasi-synthetic sequence derived from human genome
KIRRKNCPACRLRKCCQAGMVLGGRKFKKFNKVRVVRAL

SEQ ID NO: 31393 - protein, 39 aa, Artificial Sequence
  Quasi-synthetic sequence derived from human genome
RCWIYNKTKMAFLLVGICFLCKLCTIIFTTIAFFIYKRR

SEQ ID NO: 31394 - protein, 39 aa, Artificial Sequence
  Quasi-synthetic sequence derived from human genome
KLKFWTHCVLATLIMFTIFSFFAEQLIALKRKIFPRRRI

SEQ ID NO: 31395 - protein, 39 aa, Artificial Sequence
  Quasi-synthetic sequence derived from human genome
RYLRVKLTVRFRIPGLPGCILSFQLKVCFLPVMWLFILL

SEQ ID NO: 31396 - protein, 39 aa, Artificial Sequence
  Quasi-synthetic sequence derived from human genome
LCRRAVKILKKKKLRRIPNGEANVKKEIQLLRRLRHKNV

SEQ ID NO: 31397 - protein, 39 aa, Artificial Sequence
  Quasi-synthetic sequence derived from human genome
FARGAPAWLRRRYLRLRYEDLVRQPRAQLRRLLRFSGLR

SEQ ID NO: 31398 - protein, 39 aa, Artificial Sequence
  Quasi-synthetic sequence derived from human genome
RLQQGNMRKNMRVLSRTSKFRRLRQLLRRRKKRQQVRSI

SEQ ID NO: 31399 - protein, 39 aa, Artificial Sequence
  Quasi-synthetic sequence derived from human genome
LYACKKLNKKRLKKRKGYQGAMVEKKILMKVHSRFIVSL

SEQ ID NO: 31400 - protein, 39 aa, Artificial Sequence
  Quasi-synthetic sequence derived from human genome
LLGRLLIYKQGRKLFPIKLKNKKGLVSLIDLLVLFTQLI

SEQ ID NO: 31401 - protein, 39 aa, Artificial Sequence
  Quasi-synthetic sequence derived from human genome
RLRHPRTRWKNWWVRGILTLAMIAFFFIIIYLGPMVLMI

SEQ ID NO: 31402 - protein, 39 aa, Artificial Sequence
  Quasi-synthetic sequence derived from human genome
KKFLYIKSVFHTLRMAQRRHKRVRTWTRHINIFNKDYIF

SEQ ID NO: 31403 - protein, 39 aa, Artificial Sequence
  Quasi-synthetic sequence derived from human genome
VLQNLRTAMRRQMRRHASRRGPSRRRLGRLWNRLFHRPR

SEQ ID NO: 31404 - protein, 39 aa, Artificial Sequence
  Quasi-synthetic sequence derived from human genome
QFQNVRRVVQIFRIMRILRILKLARHSTGLQSLGFTLRR

SEQ ID NO: 31405 - protein, 39 aa, Artificial Sequence
  Quasi-synthetic sequence derived from human genome
VCANGLLIYRDRLRINRFAWPKILKISYKRSNFYIKIRP

SEQ ID NO: 31406 - protein, 39 aa, Artificial Sequence
  Quasi-synthetic sequence derived from human genome
TRRKMPSLGWLRKCYQQIDRRLRKNLKSLIIVHPSWFIR

SEQ ID NO: 31407 - protein, 39 aa, Artificial Sequence
  Quasi-synthetic sequence derived from human genome
VVMKFFRWVRRAWQRIISWVFFWRQKIKPTISGHPDSKK

SEQ ID NO: 31408 - protein, 39 aa, Artificial Sequence
  Quasi-synthetic sequence derived from human genome
KNYIMNKDLLRRVLVLMNSKHTFLALCALRFMRRIIGLK

SEQ ID NO: 31409 - protein, 39 aa, Artificial Sequence
  Quasi-synthetic sequence derived from human genome
ILGNKKLKQIFLSVLRHVRYWVKDRSLRLHRFTRGALCV

SEQ ID NO: 31410 - protein, 39 aa, Artificial Sequence
  Quasi-synthetic sequence derived from human genome
KYLKVFYKFLNSNRHTIRHTGKKCFKCKKCVKSFCIRLH

SEQ ID NO: 31411 - protein, 39 aa, Artificial Sequence
  Quasi-synthetic sequence derived from human genome
KWRHHRRLLTPAFHFNILKPYIKIFSKSANIMHAKWQRL

SEQ ID NO: 31412 - protein, 39 aa, Artificial Sequence
  Quasi-synthetic sequence derived from human genome
RGVSFVYNHYLFSGCFLVVLLAILLYLLRLRRIHRRTPR

SEQ ID NO: 31413 - protein, 39 aa, Artificial Sequence
  Quasi-synthetic sequence derived from human genome
RVVHLQLLRRHTLRAAERNVRRKKVSFQLERIIKKQRLL

SEQ ID NO: 31414 - protein, 39 aa, Artificial Sequence
  Quasi-synthetic sequence derived from human genome
VMIICYTGIIKILLRRPNEKKSKAVRLIFVIMIIFFLFW

SEQ ID NO: 31415 - protein, 39 aa, Artificial Sequence
  Quasi-synthetic sequence derived from human genome
RIGRILRLVRAARGIRTLLFALMMSLPSLFNIGLLLFLI

SEQ ID NO: 31416 - protein, 39 aa, Artificial Sequence
  Quasi-synthetic sequence derived from human genome
PRLDAEVYKTARALRIVRFTKILSLLRLLRLSRLIRYIH

SEQ ID NO: 31417 - protein, 39 aa, Artificial Sequence
  Quasi-synthetic sequence derived from human genome
RQQLQALLLKRFLLARRSRRGLFAQIVLPALFVGLALVF

SEQ ID NO: 31418 - protein, 39 aa, Artificial Sequence
  Quasi-synthetic sequence derived from human genome
SLKRSIKLLSLIKWKGSKSSKLNSKFWKHLVYEMPIKKK

SEQ ID NO: 31419 - protein, 39 aa, Artificial Sequence
  Quasi-synthetic sequence derived from human genome
FVAVILAFLAAVAAVLISLMWVCNKCAYKFQRKRRHKLK

SEQ ID NO: 31420 - protein, 39 aa, Artificial Sequence
  Quasi-synthetic sequence derived from human genome
FVKAGGVAMYAVSWCFMFSIWRFAWRKSIKKYHAWRSRR

SEQ ID NO: 31421 - protein, 39 aa, Artificial Sequence
  Quasi-synthetic sequence derived from human genome
YWRMRQDRVRFLNLKKTIIKFQAHVRKHQQRQKYKKMKK

SEQ ID NO: 31422 - protein, 39 aa, Artificial Sequence
  Quasi-synthetic sequence derived from human genome
RMVWRLLHGQVLTRRERRRLLRTCVDFFRLVPFMVFLIV

SEQ ID NO: 31423 - protein, 39 aa, Artificial Sequence
  Quasi-synthetic sequence derived from human genome
RNPVFPRFIKIIEVKNKKLVELLRRKVRLAQPYVGVFLK

SEQ ID NO: 31424 - protein, 39 aa, Artificial Sequence
  Quasi-synthetic sequence derived from human genome
RLRPRLHFCLVLLLLLVVPAAWGCGPGRVVGSRRRPPRK

SEQ ID NO: 31425 - protein, 39 aa, Artificial Sequence
  Quasi-synthetic sequence derived from human genome
IAKVKMKFRFLGKLMAKAIMDFRLVDLPLGLPFYKWMLR

SEQ ID NO: 31426 - protein, 39 aa, Artificial Sequence
  Quasi-synthetic sequence derived from human genome
MKPPISRAKMILITKAAIKAIKLYKHVVQIVEKFIKKCK

SEQ ID NO: 31427 - protein, 39 aa, Artificial Sequence
  Quasi-synthetic sequence derived from human genome
FVMLAVSFLVAAICYFRRLHLYSGHKLKWWIGYLQRKFK

SEQ ID NO: 31428 - protein, 39 aa, Artificial Sequence
  Quasi-synthetic sequence derived from human genome
TWLAIILLIFISLFPEILLIVLKNVRRRSARRNLSCRRA

SEQ ID NO: 31429 - protein, 39 aa, Artificial Sequence
  Quasi-synthetic sequence derived from human genome
RMYQKDPVKAKTKRRLVLGLREVLKHLKLKKLKCVIISP

SEQ ID NO: 31430 - protein, 39 aa, Artificial Sequence
  Quasi-synthetic sequence derived from human genome
FFLSRRRRARSSVCRRKVAQAREKRFTFVLAVVMGVFVL

SEQ ID NO: 31431 - protein, 39 aa, Artificial Sequence
  Quasi-synthetic sequence derived from human genome
ILTRKRIRYRFRRFIQQFSQCKATARNLKLKYLINLETL

SEQ ID NO: 31432 - protein, 39 aa, Artificial Sequence
  Quasi-synthetic sequence derived from human genome
RFLLKCGFITIPWRCIKKCSPLMPRAAVPRFVQQKLYLF

SEQ ID NO: 31433 - protein, 39 aa, Artificial Sequence
  Quasi-synthetic sequence derived from human genome
ARMRGFQARKRYLRRRAALGQLNTILLVAQPLLQRRQRL

SEQ ID NO: 31434 - protein, 39 aa, Artificial Sequence
  Quasi-synthetic sequence derived from human genome
YFRLKKVVKWYLSGFYKKPKGLKKPYNPILGETFRCLWI

SEQ ID NO: 31435 - protein, 39 aa, Artificial Sequence
  Quasi-synthetic sequence derived from human genome
KYWRRVLAQRKLLMLKKEKLEKVQNKAASLIQAMWRRYR

SEQ ID NO: 31436 - protein, 39 aa, Artificial Sequence
  Quasi-synthetic sequence derived from human genome
FYIRSYILNKDLLRKALILMNSKHTHLILCVLRFMRRMI

SEQ ID NO: 31437 - protein, 39 aa, Artificial Sequence
  Quasi-synthetic sequence derived from human genome
VSKIQRFHARSLWTNHKRYGYKKHSYRLVKKLKLQKMKK

SEQ ID NO: 31438 - protein, 39 aa, Artificial Sequence
  Quasi-synthetic sequence derived from human genome
KLSRALRYYYNKRILHKTKGKRFTYKFNFNKLVMPNYPF

SEQ ID NO: 31439 - protein, 39 aa, Artificial Sequence
  Quasi-synthetic sequence derived from human genome
REYVKKRQAAIKLEAHWRGALARKAIQRRKWAVRIIRKF

SEQ ID NO: 31440 - protein, 39 aa, Artificial Sequence
  Quasi-synthetic sequence derived from human genome
LIYLRVATWNQILDPWVYILFRRAVLRRLQPRLSTRPRR

SEQ ID NO: 31441 - protein, 39 aa, Artificial Sequence
  Quasi-synthetic sequence derived from human genome
LLLWKNVTLKRRSPWVLAFEIFIPLVLFFILLGLRQKKP

SEQ ID NO: 31442 - protein, 39 aa, Artificial Sequence
  Quasi-synthetic sequence derived from human genome
LFCLKLFKTAIPYMNHCWRHSRRRVLQCSKCRLQFLTLK

SEQ ID NO: 31443 - protein, 39 aa, Artificial Sequence
  Quasi-synthetic sequence derived from human genome
CYLLIIRSLRQGLRVEKRLKTKAVRMIAIVLAIFLVCFV

SEQ ID NO: 31444 - protein, 39 aa, Artificial Sequence
  Quasi-synthetic sequence derived from human genome
LLTLLLIAFIFLIIKSYRKYRRERLPISPGPLLRWVPLL

SEQ ID NO: 31445 - protein, 39 aa, Artificial Sequence
  Quasi-synthetic sequence derived from human genome
VLAMFFLLVLILSSVFLFRLFKRRQGRIFPEGKMWKLTF

SEQ ID NO: 31446 - protein, 39 aa, Artificial Sequence
  Quasi-synthetic sequence derived from human genome
FVALLWKRLLIARRSRKGFFAQIVLPAVFVCIALVFSLI

SEQ ID NO: 31447 - protein, 39 aa, Artificial Sequence
  Quasi-synthetic sequence derived from human genome
FGLLLKKIMAILIKRFHHTRRNWKGLIAQVILPIVFVTT

SEQ ID NO: 31448 - protein, 39 aa, Artificial Sequence
  Quasi-synthetic sequence derived from human genome
LFSKKFKLWLLNALEGVPALLQISKLKEVTLFVKRLRRK

SEQ ID NO: 31449 - protein, 39 aa, Artificial Sequence
  Quasi-synthetic sequence derived from human genome
LWFQLCRYMNPRARKNCSQIALFRKYRFHFFCSMRCRAW

SEQ ID NO: 31450 - protein, 39 aa, Artificial Sequence
  Quasi-synthetic sequence derived from human genome
KIQAWARMWAARRQYLRRLHYFQKNVNSIVKIQAFFRAR

SEQ ID NO: 31451 - protein, 39 aa, Artificial Sequence
  Quasi-synthetic sequence derived from human genome
TKSKIKSKYASYLSFIKILLKRGGVKVSTKNLIKLFQII

SEQ ID NO: 31452 - protein, 39 aa, Artificial Sequence
  Quasi-synthetic sequence derived from human genome
FKKFYFHQHLCILKAKLGRPVTWNRQLRHFQGRKKALQI

SEQ ID NO: 31453 - protein, 39 aa, Artificial Sequence
  Quasi-synthetic sequence derived from human genome
QVFKLGLAKSIHHARVLIRQRHIRVRKQVVNIPSFIVRL

SEQ ID NO: 31454 - protein, 39 aa, Artificial Sequence
  Quasi-synthetic sequence derived from human genome
RLRKILFCVLGLYIAIPFLIKLCPGIQAKLIFLNFVRVP

SEQ ID NO: 31455 - protein, 39 aa, Artificial Sequence
  Quasi-synthetic sequence derived from human genome
FLQMAVYRRRFVQQKRAAITLQHYFRTWQTRKQFLLYRK

SEQ ID NO: 31456 - protein, 39 aa, Artificial Sequence
  Quasi-synthetic sequence derived from human genome
RKRALSRLKLKLNKDIVISVGIYNLVQKALKPPPIKLYR

SEQ ID NO: 31457 - protein, 39 aa, Artificial Sequence
  Quasi-synthetic sequence derived from human genome
LLGMIVFAVMLSILSLIGIFNRSFRTGIKRRILLLIPKW

SEQ ID NO: 31458 - protein, 39 aa, Artificial Sequence
  Quasi-synthetic sequence derived from human genome
WRFIRVFIKTIRRDIFGGLVLLKVKAKVRQCLQERRTVP

SEQ ID NO: 31459 - protein, 39 aa, Artificial Sequence
  Quasi-synthetic sequence derived from human genome
KLHRVLKVFLSRTAQRIPYMTGGRVMRMLAVILLVVFWF

SEQ ID NO: 31460 - protein, 39 aa, Artificial Sequence
  Quasi-synthetic sequence derived from human genome
LRSHLIKATVIPNRVKMLPYFGIIRNRMMSTHKSKKKIR

SEQ ID NO: 31461 - protein, 39 aa, Artificial Sequence
  Quasi-synthetic sequence derived from human genome
LAILRIIRLVRVFRIFKLSRHSKGLQILGQTLKASMREL

SEQ ID NO: 31462 - protein, 39 aa, Artificial Sequence
  Quasi-synthetic sequence derived from human genome
WLSLLYKRLIGPKVLAVHVAGLQRKPRPGRVIRDKLRIY

SEQ ID NO: 31463 - protein, 39 aa, Artificial Sequence
  Quasi-synthetic sequence derived from human genome
RCAADAGMKRALGRRKGVWLRLRKILFCVLGLYIAIPFL

SEQ ID NO: 31464 - protein, 39 aa, Artificial Sequence
  Quasi-synthetic sequence derived from human genome
KYHRFLGRHFPRFYVLYTIFMKGLQMLWADAKKARRIKT

SEQ ID NO: 31465 - protein, 39 aa, Artificial Sequence
  Quasi-synthetic sequence derived from human genome
AVLLLKKLKAWNDIKKVYASQRMRAGKGKMRNRRRIQRR

SEQ ID NO: 31466 - protein, 39 aa, Artificial Sequence
  Quasi-synthetic sequence derived from human genome
FYRNKLKYLAFLRKRMNTNPSRGPYHFRAPSRIFWRTVR

SEQ ID NO: 31467 - protein, 39 aa, Artificial Sequence
  Quasi-synthetic sequence derived from human genome
MAKLWFKFQRYFRRKPVRFFTFLALYLTAGSLVFLHSGF

SEQ ID NO: 31468 - protein, 39 aa, Artificial Sequence
  Quasi-synthetic sequence derived from human genome
KRLNIRKVIPYIASQFRKDKIWLRRTKPSKRQYQICLAI

SEQ ID NO: 31469 - protein, 39 aa, Artificial Sequence
  Quasi-synthetic sequence derived from human genome
PWVYLLLRKILLRKFCQMRKRRLREQLICSLQNSQIQRA

SEQ ID NO: 31470 - protein, 39 aa, Artificial Sequence
  Quasi-synthetic sequence derived from human genome
QRILFLKPSCMLEVITWPIQAFVKRKVIIFLKKCLLCKV

SEQ ID NO: 31471 - protein, 39 aa, Artificial Sequence
  Quasi-synthetic sequence derived from human genome
KILGMLRVLRLLRTLRPLRVISRAQGLKLVVETLMSSLK

SEQ ID NO: 31472 - protein, 39 aa, Artificial Sequence
  Quasi-synthetic sequence derived from human genome
KIVILGLVLPLLVMVICYSGILKTLLRCRNEKKRHRAVR

SEQ ID NO: 31473 - protein, 39 aa, Artificial Sequence
  Quasi-synthetic sequence derived from human genome
APLFALLSRGRRRRMHVLRRRWDLGSLCRALLTRGLAAL

SEQ ID NO: 31474 - protein, 39 aa, Artificial Sequence
  Quasi-synthetic sequence derived from human genome
AKKAQLMQYLSLPKTPKMLKMSKGLDARSKRWLKIIWRR

SEQ ID NO: 31475 - protein, 39 aa, Artificial Sequence
  Quasi-synthetic sequence derived from human genome
LIWKNYKKYIIIAFILIILIIFLVLFIYTLPGAISRRIV

SEQ ID NO: 31476 - protein, 39 aa, Artificial Sequence
  Quasi-synthetic sequence derived from human genome
LAKKIKIFFALAPVVTVKYTQSPMKKLTTLSRRVVKVLF

SEQ ID NO: 31477 - protein, 39 aa, Artificial Sequence
  Quasi-synthetic sequence derived from human genome
PWMRIFIQAKRVKTKHLCYCLYRPRKYLYVTSSFKGAFK

SEQ ID NO: 31478 - protein, 39 aa, Artificial Sequence
  Quasi-synthetic sequence derived from human genome
RISITFFRLFRVMRLVKLLSRGEGIRTLLWTFIKSFQAL

SEQ ID NO: 31479 - protein, 39 aa, Artificial Sequence
  Quasi-synthetic sequence derived from human genome
WVKFIIGYLFPLLTMSICYLCLIFKVKKRSILISSRHFW

SEQ ID NO: 31480 - protein, 39 aa, Artificial Sequence
  Quasi-synthetic sequence derived from human genome
KMVKKIAMREIKLLKQLRHENLVNLLEVCKKKKRWYLVF

SEQ ID NO: 31481 - protein, 39 aa, Artificial Sequence
  Quasi-synthetic sequence derived from human genome
HIPWITAVLPTVIICVMVFCLILWKWKKKKRPRNSYKCG

SEQ ID NO: 31482 - protein, 39 aa, Artificial Sequence
  Quasi-synthetic sequence derived from human genome
KQNIFHFLYGKNRSRIPLLRKRRFQLYRSMNPRARKNRS

SEQ ID NO: 31483 - protein, 39 aa, Artificial Sequence
  Quasi-synthetic sequence derived from human genome
RRKSLRGRERVLSILRGVPHGKGRAIRLGVLKSPLKKLM

SEQ ID NO: 31484 - protein, 39 aa, Artificial Sequence
  Quasi-synthetic sequence derived from human genome
RRTRSGVGWKRVLRSLCHSRTRVPLLAAIYFLMIHVLLI

SEQ ID NO: 31485 - protein, 39 aa, Artificial Sequence
  Quasi-synthetic sequence derived from human genome
LVGVLLLFVLLLVVRRRRREQRLKRLRDAKSLAEMLMSK

SEQ ID NO: 31486 - protein, 39 aa, Artificial Sequence
  Quasi-synthetic sequence derived from human genome
VCASGLLIYRDRLRINRFAWPKVLKISYKRNNFYIKIRP

SEQ ID NO: 31487 - protein, 39 aa, Artificial Sequence
  Quasi-synthetic sequence derived from human genome
KRAFLRLLRCQCRRRRRRRPLWRVYGHHWRASTSGLRQD

SEQ ID NO: 31488 - protein, 39 aa, Artificial Sequence
  Quasi-synthetic sequence derived from human genome
VSLVLGIMAKLLPLRALPLLFNLIKVVPRVFGRMVGKSR

SEQ ID NO: 31489 - protein, 39 aa, Artificial Sequence
  Quasi-synthetic sequence derived from human genome
RQRGVGQQAMSLAILRVIRLVRVFRIFKLSRHSKGLQIL

SEQ ID NO: 31490 - protein, 39 aa, Artificial Sequence
  Quasi-synthetic sequence derived from human genome
RGRPRLRLGERGLMEPLLPPKRRLLPRVRLLPLLLALAV

SEQ ID NO: 31491 - protein, 39 aa, Artificial Sequence
  Quasi-synthetic sequence derived from human genome
RATVRALWFWAFSLQAKVWATWLAFVLERRRKKARLQWA

SEQ ID NO: 31492 - protein, 39 aa, Artificial Sequence
  Quasi-synthetic sequence derived from human genome
RYFRIQEVLKHARHFRGRKNRCYRLAVRTVIRAFVKCTK

SEQ ID NO: 31493 - protein, 39 aa, Artificial Sequence
  Quasi-synthetic sequence derived from human genome
HRLLLRRTYARNLPAFVNRLGILTVRHLKRLERVIIGYL

SEQ ID NO: 31494 - protein, 39 aa, Artificial Sequence
  Quasi-synthetic sequence derived from human genome
ILHISVMGGLIALLLLLLVFTVALYAQRRWQKRRRIPQK

SEQ ID NO: 31495 - protein, 39 aa, Artificial Sequence
  Quasi-synthetic sequence derived from human genome
KKRNSTLYITMLLIVPVIVAGAIIVLLLYLKRLKIIIFP

SEQ ID NO: 31496 - protein, 39 aa, Artificial Sequence
  Quasi-synthetic sequence derived from human genome
FHFNRYLTRRRRIEIAHALCLSERQIKIWFQNRRMKWKK

SEQ ID NO: 31497 - protein, 39 aa, Artificial Sequence
  Quasi-synthetic sequence derived from human genome
KAQRYRLIREFHSRPALAPPFIVISHLRLLLRQLCRRPR

SEQ ID NO: 31498 - protein, 39 aa, Artificial Sequence
  Quasi-synthetic sequence derived from human genome
RTRGVGKVPRKKVNVKVFIIIAVFFICFVPFHFARIPYT

SEQ ID NO: 31499 - protein, 39 aa, Artificial Sequence
  Quasi-synthetic sequence derived from human genome
RHAKIKRAITFIMVVAIVFVICFLPSVVVRIRIFWLLHT

SEQ ID NO: 31500 - protein, 39 aa, Artificial Sequence
  Quasi-synthetic sequence derived from human genome
HNKKLKKSIKIIFIVVAAFLVSWLPFNTFKFLAIVSGLR

SEQ ID NO: 31501 - protein, 39 aa, Artificial Sequence
  Quasi-synthetic sequence derived from human genome
VKKLPGVMLFKKKKTRKLKIALALSDLVIYTKAEKFKSF

SEQ ID NO: 31502 - protein, 39 aa, Artificial Sequence
  Quasi-synthetic sequence derived from human genome
RKLITKYNRRELTDKLLIFLALALFLATVLYIVKKRLFP

SEQ ID NO: 31503 - protein, 39 aa, Artificial Sequence
  Quasi-synthetic sequence derived from human genome
MQSWRRRKSLWLALSASWLLLVLLGGFSLLRLALPPRPR

SEQ ID NO: 31504 - protein, 39 aa, Artificial Sequence
  Quasi-synthetic sequence derived from human genome
FSQLRLTPGLRKVLFATALGTVALALAAHQLKRRRRRKK

SEQ ID NO: 31505 - protein, 39 aa, Artificial Sequence
  Quasi-synthetic sequence derived from human genome
ISVVKILRVLRVLRPLRAINRAKGLKHVVQCMFVAISTI

SEQ ID NO: 31506 - protein, 39 aa, Artificial Sequence
  Quasi-synthetic sequence derived from human genome
RVSISVLVPGLLLVFVTSAFTVVGMLVFILRNRKRSKRR

SEQ ID NO: 31507 - protein, 39 aa, Artificial Sequence
  Quasi-synthetic sequence derived from human genome
KFFLYVCMYVCIREKILLYKTHWMTPIFLKVVINTRRIK

SEQ ID NO: 31508 - protein, 39 aa, Artificial Sequence
  Quasi-synthetic sequence derived from human genome
QKKRVKLAQGLWLMNWFSVLAGIIIFSLGLFLKIELRKR

SEQ ID NO: 31509 - protein, 39 aa, Artificial Sequence
  Quasi-synthetic sequence derived from human genome
FLFTPVVVACMSIMALLLLLLLLLLYKYKQKPKYQVRWK

SEQ ID NO: 31510 - protein, 39 aa, Artificial Sequence
  Quasi-synthetic sequence derived from human genome
FLLPFLAVVASYSDIGRRLQARRFRRSRRTGRLVVLIIL

SEQ ID NO: 31511 - protein, 39 aa, Artificial Sequence
  Quasi-synthetic sequence derived from human genome
RLKIKQILPTIYKRKNLSLFLSISLLIFWGSSLLGARLY

SEQ ID NO: 31512 - protein, 39 aa, Artificial Sequence
  Quasi-synthetic sequence derived from human genome
QLWLVLRYRHKRLSYQSVFLFLCLFWASLRTVLFSFYFK

SEQ ID NO: 31513 - protein, 39 aa, Artificial Sequence
  Quasi-synthetic sequence derived from human genome
LFKCLLLTGGCTLLHCFVILPVFLTFFPPSKKHHKKKKR

SEQ ID NO: 31514 - protein, 39 aa, Artificial Sequence
  Quasi-synthetic sequence derived from human genome
KLGVCANGLLIYKDRLRINRFAWPKILKISYKRSNFYIK

SEQ ID NO: 31515 - protein, 39 aa, Artificial Sequence
  Quasi-synthetic sequence derived from human genome
KKYYEIVMLCGLLKMWEDLRLRVHGPFFPRILRRRKGKR

SEQ ID NO: 31516 - protein, 39 aa, Artificial Sequence
  Quasi-synthetic sequence derived from human genome
LLFGLEIRMRRIVFAGVILFRLLGVILFRLLGVILFGRL

SEQ ID NO: 31517 - protein, 39 aa, Artificial Sequence
  Quasi-synthetic sequence derived from human genome
WRAAVPIGLLVCLCLLQAFGYRLRRVIAAFYFPKREKKR

SEQ ID NO: 31518 - protein, 39 aa, Artificial Sequence
  Quasi-synthetic sequence derived from human genome
SKQNIFHFLYRKNRSRIPLLRKRWFQLGHSMNPRARKNR

SEQ ID NO: 31519 - protein, 39 aa, Artificial Sequence
  Quasi-synthetic sequence derived from human genome
RYFREATMKMAVMIFKRGVFESRRKNKAVFRPKIRINLR

SEQ ID NO: 31520 - protein, 39 aa, Artificial Sequence
  Quasi-synthetic sequence derived from human genome
RRRCCRLCIWLLQTLVHLLQLGQVWRYLRALYLGLQSRW

SEQ ID NO: 31521 - protein, 39 aa, Artificial Sequence
  Quasi-synthetic sequence derived from human genome
RVVRFVRILRIFKLTRHFVGLRVLGHTLRASTNEFLLLI

SEQ ID NO: 31522 - protein, 39 aa, Artificial Sequence
  Quasi-synthetic sequence derived from human genome
LRLQIIQRERRRKELFRKKNKAAAVIQRAWRSYQLRKHL

SEQ ID NO: 31523 - protein, 39 aa, Artificial Sequence
  Quasi-synthetic sequence derived from human genome
LLFMQSIATISLFLNILEIFHLGFKKIKRGLWGKYKLKK

SEQ ID NO: 31524 - protein, 39 aa, Artificial Sequence
  Quasi-synthetic sequence derived from human genome
ASRKWAKKSHMTWAHARLCFLLGRLSIRKVKLSQARVYF

SEQ ID NO: 31525 - protein, 39 aa, Artificial Sequence
  Quasi-synthetic sequence derived from human genome
IVRIRGTRMYQPLTEDEIRIFKRKKRIKRRALLFLSYIL

SEQ ID NO: 31526 - protein, 39 aa, Artificial Sequence
  Quasi-synthetic sequence derived from human genome
KKCIVLVTELMTSGTLKTYLKRFKVMKIKVLRSWCRQIL

SEQ ID NO: 31527 - protein, 39 aa, Artificial Sequence
  Quasi-synthetic sequence derived from human genome
VYKTARALRIVRFTKILSLLRLLRLSRLIRYIHQWEEIF

SEQ ID NO: 31528 - protein, 39 aa, Artificial Sequence
  Quasi-synthetic sequence derived from human genome
LIQAAIRSWLTRKHIQRLHAAATVIKRAWQKWRIRMACL

SEQ ID NO: 31529 - protein, 39 aa, Artificial Sequence
  Quasi-synthetic sequence derived from human genome
RLFRIKCVTRIQAYWRGCVVRKWYRNLRKTVPPTDAKLR

SEQ ID NO: 31530 - protein, 39 aa, Artificial Sequence
  Quasi-synthetic sequence derived from human genome
FRQRIILRVWWSTWRQRLGQVRVSRALHASALKHRALSL

SEQ ID NO: 31531 - protein, 39 aa, Artificial Sequence
  Quasi-synthetic sequence derived from human genome
LKNLSLLKLLKSSNRRIQELHKLAKRCWHSLLSVPKILR

SEQ ID NO: 31532 - protein, 39 aa, Artificial Sequence
  Quasi-synthetic sequence derived from human genome
LRRFREMKPRVLQRWSRQILRGLHFLHSRVPPILHRDLK

SEQ ID NO: 31533 - protein, 39 aa, Artificial Sequence
  Quasi-synthetic sequence derived from human genome
LIILTGRHRGKRVVFLKQLASGLLLVTGPLVLNRVPLRR

SEQ ID NO: 31534 - protein, 39 aa, Artificial Sequence
  Quasi-synthetic sequence derived from human genome
RFLLKRGLRNKRIGHFLFWFLRSEIAQSRHYQQRFAVIL

SEQ ID NO: 31535 - protein, 39 aa, Artificial Sequence
  Quasi-synthetic sequence derived from human genome
FKFNIAVGLILCISLVILTFQWRFYLSFRKLMRWILILV

SEQ ID NO: 31536 - protein, 39 aa, Artificial Sequence
  Quasi-synthetic sequence derived from human genome
ILKTLLRCRNEKKRHRAVRVIFTIMIVYFLFWTPYNIVI

SEQ ID NO: 31537 - protein, 39 aa, Artificial Sequence
  Quasi-synthetic sequence derived from human genome
KLLKDGGVLSPILTRLMNFFVFSRGLLQYINQRKKFRRR

SEQ ID NO: 31538 - protein, 39 aa, Artificial Sequence
  Quasi-synthetic sequence derived from human genome
KLSKRQLFFRKKLLHSSQMLRAVSLGQDRYRRRYWVLPY

SEQ ID NO: 31539 - protein, 39 aa, Artificial Sequence
  Quasi-synthetic sequence derived from human genome
LRKCFAISLLVICIIISIGIFYGFVANHQVRTRIKRSRK

SEQ ID NO: 31540 - protein, 39 aa, Artificial Sequence
  Quasi-synthetic sequence derived from human genome
LLALALVGVLILFMFRRLRQFRQAQPTPQYRFRKRDKVM

SEQ ID NO: 31541 - protein, 39 aa, Artificial Sequence
  Quasi-synthetic sequence derived from human genome
RFSWFCKRRRAFWHTPRLPTLPKRVPRAGEARNLRVLRA

SEQ ID NO: 31542 - protein, 39 aa, Artificial Sequence
  Quasi-synthetic sequence derived from human genome
KKLVPVRRRAWGQLCLPPQRLRVTRHPLIPAPVLGLLLL

SEQ ID NO: 31543 - protein, 39 aa, Artificial Sequence
  Quasi-synthetic sequence derived from human genome
LIIGLRKTFWFFFQRHKLKGTSFLLGGVVIVLLRWPLLG

SEQ ID NO: 31544 - protein, 39 aa, Artificial Sequence
  Quasi-synthetic sequence derived from human genome
ALRRFQGLLLDRRGRLHGQVLRLREVARRLERLRRRSLV

SEQ ID NO: 31545 - protein, 39 aa, Artificial Sequence
  Quasi-synthetic sequence derived from human genome
KRRERAVAIVRLVLGFLWPLLTLTICYTFILLRTWSRRA

SEQ ID NO: 31546 - protein, 39 aa, Artificial Sequence
  Quasi-synthetic sequence derived from human genome
VLQKRSWPFLRSFRVLRVFKLAKSWPTLNTLIKIIGNSV

SEQ ID NO: 31547 - protein, 39 aa, Artificial Sequence
  Quasi-synthetic sequence derived from human genome
FFILRRKPVEQKKIFTIQGCYPVIRCLLRRRGWVEKKMV

SEQ ID NO: 31548 - protein, 39 aa, Artificial Sequence
  Quasi-synthetic sequence derived from human genome
LFQMPLFLKLFICFIFIRSSPTIVSNKRVSKRKFIPPAF

SEQ ID NO: 31549 - protein, 39 aa, Artificial Sequence
  Quasi-synthetic sequence derived from human genome
RKFASIARNQVRKKRQMAARERKVTRTIFAILLAFILTW

SEQ ID NO: 31550 - protein, 39 aa, Artificial Sequence
  Quasi-synthetic sequence derived from human genome
VTFFSHFFYLSLFFWMLFKALLIIYGILVIFRRMMKSRM

SEQ ID NO: 31551 - protein, 39 aa, Artificial Sequence
  Quasi-synthetic sequence derived from human genome
CLRPPRPGLRRQWKCVQRRCLRHLAHRLRRRHQRCQRRT

SEQ ID NO: 31552 - protein, 39 aa, Artificial Sequence
  Quasi-synthetic sequence derived from human genome
ITLGLLVAGVLVLLVSLGVAIHLCCRRRRARLRFMKQFY

SEQ ID NO: 31553 - protein, 39 aa, Artificial Sequence
  Quasi-synthetic sequence derived from human genome
MASWLRRKLRGKRRPVIAFCLLMILSAMAVTRFPPQRPS

SEQ ID NO: 31554 - protein, 39 aa, Artificial Sequence
  Quasi-synthetic sequence derived from human genome
LFLTCISVHRCLGVLRPLRSLRWGRARYARRVAGAVWVL

SEQ ID NO: 31555 - protein, 39 aa, Artificial Sequence
  Quasi-synthetic sequence derived from human genome
KKMLRKALKLLNRIFPYNLISLFLHIHVEKNRHFHYVNR

SEQ ID NO: 31556 - protein, 39 aa, Artificial Sequence
  Quasi-synthetic sequence derived from human genome
LRFYPASPRRLHRASTPGPAWGWLLRRRRWAALLVLGLL

SEQ ID NO: 31557 - protein, 39 aa, Artificial Sequence
  Quasi-synthetic sequence derived from human genome
KYIHKRWALVWLACLLFAAALSLILLLKKDHAKGWLRLL

SEQ ID NO: 31558 - protein, 39 aa, Artificial Sequence
  Quasi-synthetic sequence derived from human genome
LYRELGLFQGPALGLRNHLGRKLRRRKKKKAKRTTNWKI

SEQ ID NO: 31559 - protein, 39 aa, Artificial Sequence
  Quasi-synthetic sequence derived from human genome
YGFKNIFITMFATFFFFKLLIKVFLALLTHFYIVKGNRK

SEQ ID NO: 31560 - protein, 39 aa, Artificial Sequence
  Quasi-synthetic sequence derived from human genome
IRKRLRCRRKTVLVLMCILTAYVLCWAPFYGFTIVRDFF

SEQ ID NO: 31561 - protein, 39 aa, Artificial Sequence
  Quasi-synthetic sequence derived from human genome
RGRWEGSAPRRLLLALHRRLRGLRRAAAGTSRLLFQRLL

SEQ ID NO: 31562 - protein, 39 aa, Artificial Sequence
  Quasi-synthetic sequence derived from human genome
VKRKFKHFQEFHRELLKYKAFIRIPIPTRRHTFRRQNVR

SEQ ID NO: 31563 - protein, 39 aa, Artificial Sequence
  Quasi-synthetic sequence derived from human genome
MARRGWRRAPLRRGVGSSPRARRLMRPLWLLLAVGVFDW

SEQ ID NO: 31564 - protein, 39 aa, Artificial Sequence
  Quasi-synthetic sequence derived from human genome
LVLYKKGVYLSHTGGKMLFWVLGLLILCGFLWTRKGKLK

SEQ ID NO: 31565 - protein, 39 aa, Artificial Sequence
  Quasi-synthetic sequence derived from human genome
RMWRIRRRYCQVLNAVRIIQAYWRCRSCASRGFIKGQYR

SEQ ID NO: 31566 - protein, 39 aa, Artificial Sequence
  Quasi-synthetic sequence derived from human genome
GTFFFIIGLWWCTKSILKYICKKQKRTCYLGSKTLFYRL

SEQ ID NO: 31567 - protein, 39 aa, Artificial Sequence
  Quasi-synthetic sequence derived from human genome
RVITPEDLLFLMRKDKKKLRRLLKYMFIRDYKSKIVKGI

SEQ ID NO: 31568 - protein, 39 aa, Artificial Sequence
  Quasi-synthetic sequence derived from human genome
KKLILKQALIVVLQWCFNHNFSVRLYALVALKKLWTVCK

SEQ ID NO: 31569 - protein, 39 aa, Artificial Sequence
  Quasi-synthetic sequence derived from human genome
VKRLHKVLRPFLLRRVKVDVEKQMPKKYEHVIRCRLSKR

SEQ ID NO: 31570 - protein, 39 aa, Artificial Sequence
  Quasi-synthetic sequence derived from human genome
WALIAIAIVAVLLVLTCCFCICKKCLFKKKNKKKGKEKG

SEQ ID NO: 31571 - protein, 39 aa, Artificial Sequence
  Quasi-synthetic sequence derived from human genome
TPLALAPRKPQPCRCRRRVRPSIRLLSPVLSLILLLIAL

SEQ ID NO: 31572 - protein, 39 aa, Artificial Sequence
  Quasi-synthetic sequence derived from human genome
VCSSGLLVYKDKLRINRFPWPKVLKISYKRSSFFIKIRP

SEQ ID NO: 31573 - protein, 39 aa, Artificial Sequence
  Quasi-synthetic sequence derived from human genome
KKKPVPVLLGSLLKRKMLPRAALLVTTRPRALRDLQLLA

SEQ ID NO: 31574 - protein, 39 aa, Artificial Sequence
  Quasi-synthetic sequence derived from human genome
KPMTQRALTVLMVVSGAVLVYFVVRTVRMRRRNRKTRRY

SEQ ID NO: 31575 - protein, 39 aa, Artificial Sequence
  Quasi-synthetic sequence derived from human genome
LRILSKYHRFISFTLYLIGFCMFVLSLVKKHYRLQFYMF

SEQ ID NO: 31576 - protein, 39 aa, Artificial Sequence
  Quasi-synthetic sequence derived from human genome
VAKMFPKVRESQLLLNVVSQLAKRNLRLLVLGRKHMLRR

SEQ ID NO: 31577 - protein, 39 aa, Artificial Sequence
  Quasi-synthetic sequence derived from human genome
FHFNRYLTRRRRIEIANALCLTERQIKIWFQNRRMKWKK

SEQ ID NO: 31578 - protein, 39 aa, Artificial Sequence
  Quasi-synthetic sequence derived from human genome
IFKKKAHKLTSAPLKQNFQKLLKLFYIKKLKPLYNYNSP

SEQ ID NO: 31579 - protein, 39 aa, Artificial Sequence
  Quasi-synthetic sequence derived from human genome
RFKHLKKLLLVHGHWCYSRLARMVVYYLYKNVCYVNLLF

SEQ ID NO: 31580 - protein, 39 aa, Artificial Sequence
  Quasi-synthetic sequence derived from human genome
RKILRSMSRKVTTNKLLLSIIILLELAILGGLVYYKFFR

SEQ ID NO: 31581 - protein, 39 aa, Artificial Sequence
  Quasi-synthetic sequence derived from human genome
RRRFLSLKKTAILIQRKYRAHLCTKHHLQFLQVQNAVIK

SEQ ID NO: 31582 - protein, 39 aa, Artificial Sequence
  Quasi-synthetic sequence derived from human genome
KRYPQPRGQKKKKVVKYGMGGMIIVLLICIVWFPLLFMS

SEQ ID NO: 31583 - protein, 39 aa, Artificial Sequence
  Quasi-synthetic sequence derived from human genome
IYRFLRTRNLIAPIFLHRTLTYMSHRNSRTNIKRKTFKV

SEQ ID NO: 31584 - protein, 39 aa, Artificial Sequence
  Quasi-synthetic sequence derived from human genome
LIRHKLKEVRLFLKNYSKTRFGYRIKWRIICGNNSTVIF

SEQ ID NO: 31585 - protein, 39 aa, Artificial Sequence
  Quasi-synthetic sequence derived from human genome
RSRSKRRHRTVKLIFAIVVAYFLSWGPYNFTLFLQTLFR

SEQ ID NO: 31586 - protein, 39 aa, Artificial Sequence
  Quasi-synthetic sequence derived from human genome
RFLARRTNSTFNQVVLKRLFMSRTNRPPLSLSRMIRKMK

SEQ ID NO: 31587 - protein, 39 aa, Artificial Sequence
  Quasi-synthetic sequence derived from human genome
LLVICLCYLLIVVKVRSAGRRVWAPSCQRRRRSERRVTR

SEQ ID NO: 31588 - protein, 39 aa, Artificial Sequence
  Quasi-synthetic sequence derived from human genome
LCYLLIVVKVRAAGVRVGCVRRRSERKVTRMVLVVVLVF

SEQ ID NO: 31589 - protein, 39 aa, Artificial Sequence
  Quasi-synthetic sequence derived from human genome
RSLLTLRLSKNRITQLPVRAFKLPRLTQLDLNRNRIRLI

SEQ ID NO: 31590 - protein, 39 aa, Artificial Sequence
  Quasi-synthetic sequence derived from human genome
CLKQKARRLTILLLLAFYVCFLPFHILRVIRIESRLLSI

SEQ ID NO: 31591 - protein, 39 aa, Artificial Sequence
  Quasi-synthetic sequence derived from human genome
AKVRYVKLARSLKTYGVSFFLVKEKMKGKNKLVPRLLGI

SEQ ID NO: 31592 - protein, 39 aa, Artificial Sequence
  Quasi-synthetic sequence derived from human genome
LRGRRCHCLPFPKRGMQRWMLPLRRGARLLPLASSKNPR

SEQ ID NO: 31593 - protein, 39 aa, Artificial Sequence
  Quasi-synthetic sequence derived from human genome
LKLRRNIVKLSLYRHFTNTLILAVAASIVFIIWTTMKFR

SEQ ID NO: 31594 - protein, 39 aa, Artificial Sequence
  Quasi-synthetic sequence derived from human genome
NRHKLLKLSVLLPLIFTILLLLLVAASLLAWRMMKYQQK

SEQ ID NO: 31595 - protein, 39 aa, Artificial Sequence
  Quasi-synthetic sequence derived from human genome
KLFAIIVGRGIRKWWQALPPNKKEVVKENIRKNKWKLFL

SEQ ID NO: 31596 - protein, 39 aa, Artificial Sequence
  Quasi-synthetic sequence derived from human genome
LRVIRLVRVFRIFKLSRHSKGLQILGQTLKASMRELGLL

SEQ ID NO: 31597 - protein, 39 aa, Artificial Sequence
  Quasi-synthetic sequence derived from human genome
LRVIRLVRVFRIFKLSRHSKGLQILGKTLQASMRELGLL

SEQ ID NO: 31598 - protein, 39 aa, Artificial Sequence
  Quasi-synthetic sequence derived from human genome
TRRRRRAKITGRERKAMRVLPVVVGAFLLCWTPFFVVHI

SEQ ID NO: 31599 - protein, 39 aa, Artificial Sequence
  Quasi-synthetic sequence derived from human genome
ARGGRGRRLGLALGLLLALVLAPRVLRAKPTVRKERVVR

SEQ ID NO: 31600 - protein, 39 aa, Artificial Sequence
  Quasi-synthetic sequence derived from human genome
RVLKRKTFNKVLGHVNNILISAVLPTAFRVAKKRAPKVL

SEQ ID NO: 31601 - protein, 39 aa, Artificial Sequence
  Quasi-synthetic sequence derived from human genome
RPRRRFLCHLSRQQLRMAMRIPVLYEQLKREKLRVHKAR

SEQ ID NO: 31602 - protein, 39 aa, Artificial Sequence
  Quasi-synthetic sequence derived from human genome
LAKRIKTFYALAPVATVKYTKSLINKLRFVPQSLFKFIF

SEQ ID NO: 31603 - protein, 39 aa, Artificial Sequence
  Quasi-synthetic sequence derived from human genome
LKKLGIKLQVLINLGLVYKVQQHNGIIFQFVAFIKRRQR

SEQ ID NO: 31604 - protein, 39 aa, Artificial Sequence
  Quasi-synthetic sequence derived from human genome
RVKKLPMILALHLKRFKYMEQLHRYTKLSYRVVFPLELR

SEQ ID NO: 31605 - protein, 39 aa, Artificial Sequence
  Quasi-synthetic sequence derived from human genome
KVLFRKSEKYMKLFLWLLVGVGLLGLGLRHKAYERKLGK

SEQ ID NO: 31606 - protein, 39 aa, Artificial Sequence
  Quasi-synthetic sequence derived from human genome
FKIKQFLAKKQKQNRPIPQWIRMKTGNKIRYNSKRRHWK

SEQ ID NO: 31607 - protein, 39 aa, Artificial Sequence
  Quasi-synthetic sequence derived from human genome
KKIFVFLEHQTKVLKKRHTKEKVLRRAKRRWAPIPCSML

SEQ ID NO: 31608 - protein, 39 aa, Artificial Sequence
  Quasi-synthetic sequence derived from human genome
KLRRAAILRRERQQKAPRHPLADILHRGCPLLRRWLCRR

SEQ ID NO: 31609 - protein, 39 aa, Artificial Sequence
  Quasi-synthetic sequence derived from human genome
KVLPMRRVLRKRPSPAPRTIRIEWLKSKSTKAATKFMLK

SEQ ID NO: 31610 - protein, 39 aa, Artificial Sequence
  Quasi-synthetic sequence derived from human genome
MKRKKRVHFHGFMLDVHKRIHRLKQSLPKRKPGFMAKSY

SEQ ID NO: 31611 - protein, 39 aa, Artificial Sequence
  Quasi-synthetic sequence derived from human genome
KVAARMVWRLLHGQVLTRRERRRLLRTCVDFFRLVPFMV

SEQ ID NO: 31612 - protein, 39 aa, Artificial Sequence
  Quasi-synthetic sequence derived from human genome
HVRIRVIKKKKVIMKKRKKLTLTRPTPLVTAGPLVTPTP

SEQ ID NO: 31613 - protein, 39 aa, Artificial Sequence
  Quasi-synthetic sequence derived from human genome
YARTSIRASLTFNRGFKAGRNMRRKLFGVLRLKCHSLFL

SEQ ID NO: 31614 - protein, 39 aa, Artificial Sequence
  Quasi-synthetic sequence derived from human genome
AAIRSWLTRKHIQRLHAAATVIKRAWQKWRIRMACLAAK

SEQ ID NO: 31615 - protein, 39 aa, Artificial Sequence
  Quasi-synthetic sequence derived from human genome
LGLPARPWPRWLGVAALGLAAVALGTVAWRRAWPRRRRR

SEQ ID NO: 31616 - protein, 39 aa, Artificial Sequence
  Quasi-synthetic sequence derived from human genome
RISSAFFRLFRVMRLIKLLSRAEGVRTLLWTFIKSFQAL

SEQ ID NO: 31617 - protein, 39 aa, Artificial Sequence
  Quasi-synthetic sequence derived from human genome
FKIQSKLLKHKQIHTRNKAFRALLLKKRRTESRPLPNKL

SEQ ID NO: 31618 - protein, 39 aa, Artificial Sequence
  Quasi-synthetic sequence derived from human genome
RRHFRMKLRNLFTKFIRKFGFELVKRLLPEEYHRVLVNI

SEQ ID NO: 31619 - protein, 39 aa, Artificial Sequence
  Quasi-synthetic sequence derived from human genome
RGRRAWLSVLLGLVLGFVLASRLVLPRASELKRAGPRRR

SEQ ID NO: 31620 - protein, 39 aa, Artificial Sequence
  Quasi-synthetic sequence derived from human genome
RKAFAKKQQQLSALKVLQRNCAAYLKLRHWQWWRVFTKV

SEQ ID NO: 31621 - protein, 39 aa, Artificial Sequence
  Quasi-synthetic sequence derived from human genome
MWICQICRPRKKGRKLLQKKAAQIKRRYTNPIGRPKNRL

SEQ ID NO: 31622 - protein, 39 aa, Artificial Sequence
  Quasi-synthetic sequence derived from human genome
LYGFMVFFLINPTKTFYYKSRFWLLKLLFRVFTAPFHKV

SEQ ID NO: 31623 - protein, 39 aa, Artificial Sequence
  Quasi-synthetic sequence derived from human genome
ILASQKVKKIWQKQFRWPKNRLQILKFCKAREDLLKIQK

SEQ ID NO: 31624 - protein, 39 aa, Artificial Sequence
  Quasi-synthetic sequence derived from human genome
FLRLKRRVKSVILVVLLGPLLFLACHLFVVNMNQIVWTK

SEQ ID NO: 31625 - protein, 39 aa, Artificial Sequence
  Quasi-synthetic sequence derived from human genome
LMAHPFLLLILLCMSLLLFQVIRLYQRRRWMIRALHLFP

SEQ ID NO: 31626 - protein, 39 aa, Artificial Sequence
  Quasi-synthetic sequence derived from human genome
LYKRYGGFLRRIRPKLKWDNQKRYGGFLRRQFKVVTRSQ

SEQ ID NO: 31627 - protein, 39 aa, Artificial Sequence
  Quasi-synthetic sequence derived from human genome
ALLLWKMRLFQRQWANSFFQGLQQRMLQRSLRWWHLRAL

SEQ ID NO: 31628 - protein, 39 aa, Artificial Sequence
  Quasi-synthetic sequence derived from human genome
WQVPIWIIVGSTLGGLLLLALLVLALWKLGFFRSARRRR

SEQ ID NO: 31629 - protein, 39 aa, Artificial Sequence
  Quasi-synthetic sequence derived from human genome
RLLREKEAKIRKALDRLRKKRHLLRRQRTRREFPVISVV

SEQ ID NO: 31630 - protein, 39 aa, Artificial Sequence
  Quasi-synthetic sequence derived from human genome
KRKARTVLKSTSKLMTQMRMGKKKRAMKGKKPSFMVIRF

SEQ ID NO: 31631 - protein, 39 aa, Artificial Sequence
  Quasi-synthetic sequence derived from human genome
FGAMFAKTWRVHAIFKNVKMKKKIIKDQKLLVIVGGMLL

SEQ ID NO: 31632 - protein, 39 aa, Artificial Sequence
  Quasi-synthetic sequence derived from human genome
LLLRKILLRKFCQMRKRRLREQFWRPASSGSGCQQIRCL

SEQ ID NO: 31633 - protein, 39 aa, Artificial Sequence
  Quasi-synthetic sequence derived from human genome
IRHMIRKNKYRPDLRMAAIRRASAILRSQKPVMVKRKRT

SEQ ID NO: 31634 - protein, 39 aa, Artificial Sequence
  Quasi-synthetic sequence derived from human genome
PWRVIGYHVVVWMMAGIPLLLFRWKPLWGVRLRLRPCNL

SEQ ID NO: 31635 - protein, 39 aa, Artificial Sequence
  Quasi-synthetic sequence derived from human genome
FLARRTNSTFNQVVLKRLFMSRTNRPPLSLSRMIRKMKL

SEQ ID NO: 31636 - protein, 39 aa, Artificial Sequence
  Quasi-synthetic sequence derived from human genome
ITGWRKTVCHNGVLGLSRLLFFLLGFLRIRVRGQRASRL

SEQ ID NO: 31637 - protein, 39 aa, Artificial Sequence
  Quasi-synthetic sequence derived from human genome
RIMRVLRIARVLKLLKMAVGMRALLDTVGNLGLLFMLLF

SEQ ID NO: 31638 - protein, 39 aa, Artificial Sequence
  Quasi-synthetic sequence derived from human genome
MIHLPIYRHLRRFILSVIVFGSIVLLMLWLPIRIIKSVL

SEQ ID NO: 31639 - protein, 39 aa, Artificial Sequence
  Quasi-synthetic sequence derived from human genome
WRLPRISARAPYRLRRLRRHTYWPPRRPVAASRCWPVGA

SEQ ID NO: 31640 - protein, 39 aa, Artificial Sequence
  Quasi-synthetic sequence derived from human genome
WFICSLCVPRVRKLWSSRRPRTRRNLLLGTACAIYLGFL

SEQ ID NO: 31641 - protein, 39 aa, Artificial Sequence
  Quasi-synthetic sequence derived from human genome
RLLFAKLFGHLTSARRARKSEVPHFRLKKVQNIKMWLSL

SEQ ID NO: 31642 - protein, 39 aa, Artificial Sequence
  Quasi-synthetic sequence derived from human genome
KAKALKAKKAVLKGVHSHKKKKIRTSPTFRRPKTLRLRR

SEQ ID NO: 31643 - protein, 39 aa, Artificial Sequence
  Quasi-synthetic sequence derived from human genome
LRALLVVVNALLRKRRYHAALAVLKGFRNGAVYGAKIRA

SEQ ID NO: 31644 - protein, 39 aa, Artificial Sequence
  Quasi-synthetic sequence derived from human genome
KKINKLFCFNFLVQCFRGKSKPSKCQIRKKVKNHIERLL

SEQ ID NO: 31645 - protein, 39 aa, Artificial Sequence
  Quasi-synthetic sequence derived from human genome
KYIWRIGTDGRTVRRTMNIVPRTKVKTIKMFLILNLLFL

SEQ ID NO: 31646 - protein, 39 aa, Artificial Sequence
  Quasi-synthetic sequence derived from human genome
IKSSFLLKFIRKMTSRHWCAVPILFLSKALANVPRHKAL

SEQ ID NO: 31647 - protein, 39 aa, Artificial Sequence
  Quasi-synthetic sequence derived from human genome
RLQSWVRMWCVRQRYCRLLNAVRIIQVYWRWHSCHSRVF

SEQ ID NO: 31648 - protein, 39 aa, Artificial Sequence
  Quasi-synthetic sequence derived from human genome
VIPWHLNKRYNRKRFFALPYVDHFLRLEREKRARIKARK

SEQ ID NO: 31649 - protein, 39 aa, Artificial Sequence
  Quasi-synthetic sequence derived from human genome
CKAIRFSYPSIHPFILIWGNKKLKQTFLSVLRQVRYWVK

SEQ ID NO: 31650 - protein, 39 aa, Artificial Sequence
  Quasi-synthetic sequence derived from human genome
LLRRWKHWLLLLGICCPKPHGRVSSRLRLSRSLGHFFHS

SEQ ID NO: 31651 - protein, 39 aa, Artificial Sequence
  Quasi-synthetic sequence derived from human genome
LRAARLRHQELFRLRGIKAQVALRLAELARRQRRRQARR

SEQ ID NO: 31652 - protein, 39 aa, Artificial Sequence
  Quasi-synthetic sequence derived from human genome
LLLPLLLLKLHLWPQLRWLPADLAFAVRALCCKRALRAR

SEQ ID NO: 31653 - protein, 39 aa, Artificial Sequence
  Quasi-synthetic sequence derived from human genome
WMFYKHTRRKESHAARRHQRKLLAAINAFRQVRLKHRKL

SEQ ID NO: 31654 - protein, 39 aa, Artificial Sequence
  Quasi-synthetic sequence derived from human genome
RKAFAKRQQQLTAMKVLQRNCAAYLKLRNWQWWRLFTKV

SEQ ID NO: 31655 - protein, 39 aa, Artificial Sequence
  Quasi-synthetic sequence derived from human genome
TPTQKTARLFSKKIFCCLFFITLFFIRLLSYMFFHVRFI

SEQ ID NO: 31656 - protein, 39 aa, Artificial Sequence
  Quasi-synthetic sequence derived from human genome
VAVVLLLLLLLLLFLILRHRRQGKHWTSSPAQLPTPRKK

SEQ ID NO: 31657 - protein, 39 aa, Artificial Sequence
  Quasi-synthetic sequence derived from human genome
RPHLPGKKKIRWDPVRRRFIQSCPIIRIPNRFLRGHRPP

SEQ ID NO: 31658 - protein, 39 aa, Artificial Sequence
  Quasi-synthetic sequence derived from human genome
LRGLLMAHSQRLLFRIGYSLYTRTWLGYLFYRQQLRRAR

SEQ ID NO: 31659 - protein, 39 aa, Artificial Sequence
  Quasi-synthetic sequence derived from human genome
AMAAGGRWVRQQGPRVRRGISRLWLRVLLRLSPMAFRAL

SEQ ID NO: 31660 - protein, 39 aa, Artificial Sequence
  Quasi-synthetic sequence derived from human genome
IMYKVPLIRKKSLRRTLSERGLLKDFLKKHNLNPARKYF

SEQ ID NO: 31661 - protein, 39 aa, Artificial Sequence
  Quasi-synthetic sequence derived from human genome
LRLRNKLRGVQRNLAGSLVRLSALVKSKQKAYFILSLGR

SEQ ID NO: 31662 - protein, 39 aa, Artificial Sequence
  Quasi-synthetic sequence derived from human genome
LGLLILLRLWRVARIINGIIISVKTRSERQLLRLKQMNV

SEQ ID NO: 31663 - protein, 39 aa, Artificial Sequence
  Quasi-synthetic sequence derived from human genome
RKSALHLFRLGNAMLRIVRSKARPLLHVMRCWSLVAPHL

SEQ ID NO: 31664 - protein, 39 aa, Artificial Sequence
  Quasi-synthetic sequence derived from human genome
LRAAKWLHFPQLALRRRLGQLSCMSRPALKLRSWPLTVL

SEQ ID NO: 31665 - protein, 39 aa, Artificial Sequence
  Quasi-synthetic sequence derived from human genome
FLLALLGLVVKRAVERRKALSRRARRLAVRMRALESSQR

SEQ ID NO: 31666 - protein, 39 aa, Artificial Sequence
  Quasi-synthetic sequence derived from human genome
LRLRKNTVKFSLYRHFKNTLIFAVLASIVFMGWTTKTFR

SEQ ID NO: 31667 - protein, 39 aa, Artificial Sequence
  Quasi-synthetic sequence derived from human genome
KTFVVLNRGKTLFRFSATPALYILSPFNLIRRIAIKILI

SEQ ID NO: 31668 - protein, 39 aa, Artificial Sequence
  Quasi-synthetic sequence derived from human genome
FVKGLIQGAIYAGIVIALLFLCLLPLIVKHIRKKQAKKA

SEQ ID NO: 31669 - protein, 39 aa, Artificial Sequence
  Quasi-synthetic sequence derived from human genome
WWRFLSMWGMFSVITSYILFRATRKPLSGRTPRLVYKWF

SEQ ID NO: 31670 - protein, 39 aa, Artificial Sequence
  Quasi-synthetic sequence derived from human genome
RLKHRGSSLHPFRKGLQEKDKVWLLREQKRKKKLRKLLK

SEQ ID NO: 31671 - protein, 39 aa, Artificial Sequence
  Quasi-synthetic sequence derived from human genome
FRRLKAHNLCRQIRAACVIQSYWRMRQDRVRFLNLKKTI

SEQ ID NO: 31672 - protein, 39 aa, Artificial Sequence
  Quasi-synthetic sequence derived from human genome
FPVSWRTRMRAFHLSLPGGAQLLTYLVKVLKRRTWRRNV

SEQ ID NO: 31673 - protein, 39 aa, Artificial Sequence
  Quasi-synthetic sequence derived from human genome
VILATLGVALLFIVRKKRKEKRLKRLRDAKSLAEMLISK

SEQ ID NO: 31674 - protein, 39 aa, Artificial Sequence
  Quasi-synthetic sequence derived from human genome
KLIRRRPFRQIQVLEPLNLLITISGHKNRLRVYHLTWLR

SEQ ID NO: 31675 - protein, 39 aa, Artificial Sequence
  Quasi-synthetic sequence derived from human genome
YLYHRELTKIPIFSLFRKWKAFSVWRKNVRSKKITGCQK

SEQ ID NO: 31676 - protein, 39 aa, Artificial Sequence
  Quasi-synthetic sequence derived from human genome
KFLLAFLVPLAIIASSHAAVSLRLQHRGRRRPGRFVRLV

SEQ ID NO: 31677 - protein, 39 aa, Artificial Sequence
  Quasi-synthetic sequence derived from human genome
ILLPVHLLITIYSALIFIPWYFLTNAKKKNAMAKRIKAK

SEQ ID NO: 31678 - protein, 39 aa, Artificial Sequence
  Quasi-synthetic sequence derived from human genome
RKRRRLLSIIVVLVVTFALCWMPYHLVKTLYMLGSLLHW

SEQ ID NO: 31679 - protein, 39 aa, Artificial Sequence
  Quasi-synthetic sequence derived from human genome
RKLVIVRAGCPIRLFAIVRGRPAPKVTWRKVGIDNVVRK

SEQ ID NO: 31680 - protein, 39 aa, Artificial Sequence
  Quasi-synthetic sequence derived from human genome
ALSLLLGVARSLWMLLKLRQRLRSPTAPFTSPLPRGKRR

SEQ ID NO: 31681 - protein, 39 aa, Artificial Sequence
  Quasi-synthetic sequence derived from human genome
QKYVLARRRLVKVINNRAKLLSLCSFIIETCLFILWRHL

SEQ ID NO: 31682 - protein, 39 aa, Artificial Sequence
  Quasi-synthetic sequence derived from human genome
LLFLLFFLTLRFSVVKRGRKKLLYIFKQPFMRPVQTTQE

SEQ ID NO: 31683 - protein, 39 aa, Artificial Sequence
  Quasi-synthetic sequence derived from human genome
KHVRGWMARRHFQRLRDAAIVIQCAFRMLKARRELKALR

SEQ ID NO: 31684 - protein, 39 aa, Artificial Sequence
  Quasi-synthetic sequence derived from human genome
WTSLTRKGIVRVVFFPFFFRWWLQVTSKVIFFWLLVLYL

SEQ ID NO: 31685 - protein, 39 aa, Artificial Sequence
  Quasi-synthetic sequence derived from human genome
LVWRVLHALLCLHRTLTSWLRVRFGTWNWIWRRCCRAAS

SEQ ID NO: 31686 - protein, 39 aa, Artificial Sequence
  Quasi-synthetic sequence derived from human genome
LVRHKDVRRIRSLQRSVQVLRAIVVMYVICWLPYHARRL

SEQ ID NO: 31687 - protein, 39 aa, Artificial Sequence
  Quasi-synthetic sequence derived from human genome
MSTVMRLRTKMPWKTCWRYLTSGGFFLLILMIFSKLLKH

SEQ ID NO: 31688 - protein, 39 aa, Artificial Sequence
  Quasi-synthetic sequence derived from human genome
MVLKPHFHKDWQRRVATWFNQPARKIRRRKARQAKARRI

SEQ ID NO: 31689 - protein, 39 aa, Artificial Sequence
  Quasi-synthetic sequence derived from human genome
IRTLRDQLLLLHNQLLYERFKRQQHALRNRRLLRKVIKA

SEQ ID NO: 31690 - protein, 39 aa, Artificial Sequence
  Quasi-synthetic sequence derived from human genome
RLGRKKTMALCFVIFSFCSLLLFICVGRNVLTLLLFIAR

SEQ ID NO: 31691 - protein, 39 aa, Artificial Sequence
  Quasi-synthetic sequence derived from human genome
FHYNRYLTRRRRIEIAHALCLTERQIKIWFQNRRMKWKK

SEQ ID NO: 31692 - protein, 39 aa, Artificial Sequence
  Quasi-synthetic sequence derived from human genome
LKGKKCIVLVTELMTSGTLKTYLKRFKVMKPKVLRSWCR

SEQ ID NO: 31693 - protein, 39 aa, Artificial Sequence
  Quasi-synthetic sequence derived from human genome
PRTLMHLSRCAIRRTLHNRCHRAIPLLSLPLSLKKYLLL

SEQ ID NO: 31694 - protein, 39 aa, Artificial Sequence
  Quasi-synthetic sequence derived from human genome
RNLVLKNRSLKLQKMKYRPPKTKFFFTVIPQPIFLSPGI

SEQ ID NO: 31695 - protein, 39 aa, Artificial Sequence
  Quasi-synthetic sequence derived from human genome
NCRKNYGLMRLGFLRLQALHRSRKLHQQYRLARQRIIQF

SEQ ID NO: 31696 - protein, 39 aa, Artificial Sequence
  Quasi-synthetic sequence derived from human genome
RKHLSWWWLATVCMLLFSHLSAVQTRGIKHRIKWNRKAL

SEQ ID NO: 31697 - protein, 39 aa, Artificial Sequence
  Quasi-synthetic sequence derived from human genome
RRWKKKQLRRPSLLLLGCCSFGIMAPSLWKGLVGIGLFA

SEQ ID NO: 31698 - protein, 39 aa, Artificial Sequence
  Quasi-synthetic sequence derived from human genome
LGKDMVRFVVRKTVQRSVAKGSRRCKKRMFKFHQMKHIF

SEQ ID NO: 31699 - protein, 39 aa, Artificial Sequence
  Quasi-synthetic sequence derived from human genome
RKAFAKRQQQLTAMKVIQRNCAAYLKLRNWQWWRLFTKV

SEQ ID NO: 31700 - protein, 39 aa, Artificial Sequence
  Quasi-synthetic sequence derived from human genome
MVRRTLLQAALRAWVIQCWWRSMQAKMLEQRRRLALRLY

SEQ ID NO: 31701 - protein, 39 aa, Artificial Sequence
  Quasi-synthetic sequence derived from human genome
KNLRRRKAHFQYLLNHRLQILSPVLPVSCRDPRHLRRLR

SEQ ID NO: 31702 - protein, 39 aa, Artificial Sequence
  Quasi-synthetic sequence derived from human genome
MSWSRIKKILKEGPMLKNCNSFKRWKLRYFLVQGQKLYF

SEQ ID NO: 31703 - protein, 39 aa, Artificial Sequence
  Quasi-synthetic sequence derived from human genome
KQRFLFAKLFSHITSARKARKYEIPHFRLKKVENIKIWL

SEQ ID NO: 31704 - protein, 39 aa, Artificial Sequence
  Quasi-synthetic sequence derived from human genome
LKKKLFLTLKENEKLRKRLQAQRLVMRRMSSRLRACKGH

SEQ ID NO: 31705 - protein, 39 aa, Artificial Sequence
  Quasi-synthetic sequence derived from human genome
LHILEHRVRVLSVARPGLWLYTHPLIKLLFLPRRSRCKF

SEQ ID NO: 31706 - protein, 39 aa, Artificial Sequence
  Quasi-synthetic sequence derived from human genome
KLFARKMKILGTIQILFGIMTFSFGVIFLFTLLKPYPRF

SEQ ID NO: 31707 - protein, 39 aa, Artificial Sequence
  Quasi-synthetic sequence derived from human genome
LKKGVFNKSRCTICSKLAEVWIFIPKLLFRLTVIILTFK

SEQ ID NO: 31708 - protein, 39 aa, Artificial Sequence
  Quasi-synthetic sequence derived from human genome
IAGATIGASILLIFFFIALVFFLYRRRKGSRKDVTLRKL

SEQ ID NO: 31709 - protein, 39 aa, Artificial Sequence
  Quasi-synthetic sequence derived from human genome
FFRGLLYWKNTLALAAILVLLRVRQCLSLRPAPAMRVAR

SEQ ID NO: 31710 - protein, 39 aa, Artificial Sequence
  Quasi-synthetic sequence derived from human genome
LGYFNSCVNPLIYPCSSREFKRAFLRLLRCQCRRRRRRR

SEQ ID NO: 31711 - protein, 39 aa, Artificial Sequence
  Quasi-synthetic sequence derived from human genome
KITSRPFTRFRTAVRVVIAILRLRFLVKKWQEVDRKGAL

SEQ ID NO: 31712 - protein, 39 aa, Artificial Sequence
  Quasi-synthetic sequence derived from human genome
FHFNRYLTRRRRIEIAHTLCLSERQVKIWFQNRRMKWKK

SEQ ID NO: 31713 - protein, 39 aa, Artificial Sequence
  Quasi-synthetic sequence derived from human genome
RSLKPMQTRVVGRLQKPCFFFHWLKLFAIPILLIAVFLV

SEQ ID NO: 31714 - protein, 39 aa, Artificial Sequence
  Quasi-synthetic sequence derived from human genome
RCFRSWRHLVKRQREPAAAAVALGRWQLLRKCLQALWLR

SEQ ID NO: 31715 - protein, 39 aa, Artificial Sequence
  Quasi-synthetic sequence derived from human genome
VLYLLRGRKTFLIPVLFNNYITAALKLLEKLYKVNLKVK

SEQ ID NO: 31716 - protein, 39 aa, Artificial Sequence
  Quasi-synthetic sequence derived from human genome
RLLRVLKLVRFMPALRRQLVVLMKTMDNVATFCMLLMLF

SEQ ID NO: 31717 - protein, 39 aa, Artificial Sequence
  Quasi-synthetic sequence derived from human genome
ALAILIMRLKMFLTPHMCVMASLICSRQLFGWLFRRVRF

SEQ ID NO: 31718 - protein, 39 aa, Artificial Sequence
  Quasi-synthetic sequence derived from human genome
SFFVRLGPMALAFKVRGLLDCKHSWKRLKDIRKIFPGKK

SEQ ID NO: 31719 - protein, 39 aa, Artificial Sequence
  Quasi-synthetic sequence derived from human genome
LPTSRLDLACSLSWNVIRYSLQKLRLVRWLLKKVFQCRR

SEQ ID NO: 31720 - protein, 39 aa, Artificial Sequence
  Quasi-synthetic sequence derived from human genome
LLIYLRVATWNQILDPWVYILFRRAVLRRLQPRLSTRPR

SEQ ID NO: 31721 - protein, 39 aa, Artificial Sequence
  Quasi-synthetic sequence derived from human genome
LVSAGVVILLIISSILGSVWLAYKTPKLLRTARGRRIKK

SEQ ID NO: 31722 - protein, 39 aa, Artificial Sequence
  Quasi-synthetic sequence derived from human genome
ILINFKATKFLNLNLRYSFLKTASFFVRLGPMALAFKVR

SEQ ID NO: 31723 - protein, 39 aa, Artificial Sequence
  Quasi-synthetic sequence derived from human genome
VRRILQRVPGKQRFGIYRFLPFFFVLGGTMEWIMIKVRV

SEQ ID NO: 31724 - protein, 39 aa, Artificial Sequence
  Quasi-synthetic sequence derived from human genome
RSWGYVLLIVLFCLFIFVLIYVRVFRKSRRSLNSQPLNL

SEQ ID NO: 31725 - protein, 39 aa, Artificial Sequence
  Quasi-synthetic sequence derived from human genome
LTSNRVAKMGLILAIRSILLVIPFPFTLRRLKYCQKNLL

SEQ ID NO: 31726 - protein, 39 aa, Artificial Sequence
  Quasi-synthetic sequence derived from human genome
RPRRRASRAFCPRPCALPGRPGLTLLCRPRCRRQPRLRL

SEQ ID NO: 31727 - protein, 39 aa, Artificial Sequence
  Quasi-synthetic sequence derived from human genome
NFVYKLFSLQDLLLLVRCSVQRIETRPRSKKRKKIRRQF

SEQ ID NO: 31728 - protein, 39 aa, Artificial Sequence
  Quasi-synthetic sequence derived from human genome
RAWIRLSLEKKLLSQHLKQLLSNQPLTKKLYKRYAFLRC

SEQ ID NO: 31729 - protein, 39 aa, Artificial Sequence
  Quasi-synthetic sequence derived from human genome
ILKAVKIIQGCFYTKLERTRFLNVRASAIIIQRKWRAIL

SEQ ID NO: 31730 - protein, 39 aa, Artificial Sequence
  Quasi-synthetic sequence derived from human genome
CRPVFPCRRRFCPRPFLVGLVVAICLFYQTLTLRGSRKL

SEQ ID NO: 31731 - protein, 39 aa, Artificial Sequence
  Quasi-synthetic sequence derived from human genome
LLVRTDKRSDSLIRKKFRMMKIPKPILFGLNIAMKKQTK

SEQ ID NO: 31732 - protein, 39 aa, Artificial Sequence
  Quasi-synthetic sequence derived from human genome
AILKQKAPQQYRIRAKLRSYKPRRLFQSVKLHCPKCHLL

SEQ ID NO: 31733 - protein, 39 aa, Artificial Sequence
  Quasi-synthetic sequence derived from human genome
QKEKLKNILLRIQQIIYCHKLTIILTKWRNTARHKSKKK

SEQ ID NO: 31734 - protein, 39 aa, Artificial Sequence
  Quasi-synthetic sequence derived from human genome
VTLGLLVAGVLVLLVSLGVAMHLCCRRRRARLRFMKQFY

SEQ ID NO: 31735 - protein, 39 aa, Artificial Sequence
  Quasi-synthetic sequence derived from human genome
PKQNIFYFLYGKTRSRIPLVRNRRFQLCRCMNPRARKNR

SEQ ID NO: 31736 - protein, 39 aa, Artificial Sequence
  Quasi-synthetic sequence derived from human genome
VSLKWKRYGRPYFCMLGAIYLLYIICFTMCCIYRPLKPR

SEQ ID NO: 31737 - protein, 39 aa, Artificial Sequence
  Quasi-synthetic sequence derived from human genome
IFSKVRIFGLKKRRLRRQDPQLKGIVTRLYCRQGYYLQM

SEQ ID NO: 31738 - protein, 39 aa, Artificial Sequence
  Quasi-synthetic sequence derived from human genome
KRKKKAWKRMVTKVCFVGDGFTRKPPKYERFIRPMGLRF

SEQ ID NO: 31739 - protein, 39 aa, Artificial Sequence
  Quasi-synthetic sequence derived from human genome
LAAGFVVYLKRKTLIRLLFTNKKTTIEKLRCVRPSRPPR

SEQ ID NO: 31740 - protein, 39 aa, Artificial Sequence
  Quasi-synthetic sequence derived from human genome
IFSFLIVVLVLYVSWKCFPASLRQLRQCFVTQRRKQKQK

SEQ ID NO: 31741 - protein, 39 aa, Artificial Sequence
  Quasi-synthetic sequence derived from human genome
HLYHARLWLHVLPTLPGTLCLRIFRWGPRRRRQGSRTLL

SEQ ID NO: 31742 - protein, 39 aa, Artificial Sequence
  Quasi-synthetic sequence derived from human genome
HILQIRKLRHRLSNFPRLPGILAPETVLLPFCYKVFRKK

SEQ ID NO: 31743 - protein, 39 aa, Artificial Sequence
  Quasi-synthetic sequence derived from human genome
LVMLAARHYWNAWLPLLSSAVYRKKAKGALKRLIGIINK

SEQ ID NO: 31744 - protein, 39 aa, Artificial Sequence
  Quasi-synthetic sequence derived from human genome
WKRWFKFRKRKGEKRPRPNHKAVARRAKLKFSTSEKLHW

SEQ ID NO: 31745 - protein, 39 aa, Artificial Sequence
  Quasi-synthetic sequence derived from human genome
PIKYLRKSLKIIYLNSIQELEIRNMSWPRLIRKLRCYLK

SEQ ID NO: 31746 - protein, 39 aa, Artificial Sequence
  Quasi-synthetic sequence derived from human genome
RTGGWKVSAVTLAYLIFCLCSLVGILHLQRALVLRRKRK

SEQ ID NO: 31747 - protein, 39 aa, Artificial Sequence
  Quasi-synthetic sequence derived from human genome
KRRMSVGQQTWALLCKNCLKKWRMKRQTLLEWLFSFLLV

SEQ ID NO: 31748 - protein, 39 aa, Artificial Sequence
  Quasi-synthetic sequence derived from human genome
RPVLAGIVATICFLAAAILFSTLAACFVNKQRKRKLKRK

SEQ ID NO: 31749 - protein, 39 aa, Artificial Sequence
  Quasi-synthetic sequence derived from human genome
PLHIFPRLARHDRGNYVRLNMKQKHYVRGRALRSRLLRK

SEQ ID NO: 31750 - protein, 39 aa, Artificial Sequence
  Quasi-synthetic sequence derived from human genome
RAGITAAINLAKLKLFRHYYVLIVCYIYFTRIIAFLLKL

SEQ ID NO: 31751 - protein, 39 aa, Artificial Sequence
  Quasi-synthetic sequence derived from human genome
LGPGLSVLGGLFLLFVLENMLGLLRHRGLRPRCCRRKRR

SEQ ID NO: 31752 - protein, 39 aa, Artificial Sequence
  Quasi-synthetic sequence derived from human genome
LLFSFFFIIFIVFISRKCCPPTLRRIRQCSMVQNHRQLR

SEQ ID NO: 31753 - protein, 39 aa, Artificial Sequence
  Quasi-synthetic sequence derived from human genome
LQRQHKCAIIIQSYYRMHVQQKKWKIMKKAALLIQKYYR

SEQ ID NO: 31754 - protein, 39 aa, Artificial Sequence
  Quasi-synthetic sequence derived from human genome
FIPFFKYCLLRKSFTCWKKNVRLQGLHRLQKFLENHLLL

SEQ ID NO: 31755 - protein, 39 aa, Artificial Sequence
  Quasi-synthetic sequence derived from human genome
LGIFVFFRKLTTIFPLNWKYRKALSLGCQRVTLHKNMFL

SEQ ID NO: 31756 - protein, 39 aa, Artificial Sequence
  Quasi-synthetic sequence derived from human genome
KRCIVLVTELMTSGTLKTYLKRFKVMKPKVLRSWCRQIL

SEQ ID NO: 31757 - protein, 39 aa, Artificial Sequence
  Quasi-synthetic sequence derived from human genome
IKKKFVDRAKRIDTISRAAFPLAFLIFNIFYWITYKIIR

SEQ ID NO: 31758 - protein, 39 aa, Artificial Sequence
  Quasi-synthetic sequence derived from human genome
LRVMRLMRIFRILKLARHSTGLRAFGFTLRQCYQQVGCL

SEQ ID NO: 31759 - protein, 39 aa, Artificial Sequence
  Quasi-synthetic sequence derived from human genome
RGQPNTALLSLVLMAGTFFIAFFLRKFKNSRFFPGRIRR

SEQ ID NO: 31760 - protein, 39 aa, Artificial Sequence
  Quasi-synthetic sequence derived from human genome
WWRNNFWIILAVAIIVVSVGLGLILYCVCKWQLRRGKKW

SEQ ID NO: 31761 - protein, 39 aa, Artificial Sequence
  Quasi-synthetic sequence derived from human genome
RNHKTFMVLNRKRTIYRFSAKHALFIFGPFNSIRSLAIR

SEQ ID NO: 31762 - protein, 39 aa, Artificial Sequence
  Quasi-synthetic sequence derived from human genome
KKPRTFIIKLIKWLMIAIPATFVNSAIRYLECKLALAFR

SEQ ID NO: 31763 - protein, 39 aa, Artificial Sequence
  Quasi-synthetic sequence derived from human genome
KKKMSKLSRSARAGVIFPVGRLMRYLKKGTFKYRISVGA

SEQ ID NO: 31764 - protein, 39 aa, Artificial Sequence
  Quasi-synthetic sequence derived from human genome
PPGMLWLMERGGLGKPRGPRHRGLLRVRLGRFISRLLLW

SEQ ID NO: 31765 - protein, 39 aa, Artificial Sequence
  Quasi-synthetic sequence derived from human genome
LAFLPLVVTLLVRYRHYFRLLVRTVLLRSLRDCLSGLRI

SEQ ID NO: 31766 - protein, 39 aa, Artificial Sequence
  Quasi-synthetic sequence derived from human genome
TKSKTKSKYASYLSFIKILLKRGGVRVSTKNLIKLFQII

SEQ ID NO: 31767 - protein, 39 aa, Artificial Sequence
  Quasi-synthetic sequence derived from human genome
CRRIVVSRGRLRRLLWIGFTLTAVALILWQCALLVFSFY

SEQ ID NO: 31768 - protein, 39 aa, Artificial Sequence
  Quasi-synthetic sequence derived from human genome
FHRLCKLLFFRIRPIFVFDGDAPLLKKQTLVKRRQRKDL

SEQ ID NO: 31769 - protein, 39 aa, Artificial Sequence
  Quasi-synthetic sequence derived from human genome
RMWGRLVGLVYILPAAYFWRKGWLSRGMKGRVLALCGLV

SEQ ID NO: 31770 - protein, 39 aa, Artificial Sequence
  Quasi-synthetic sequence derived from human genome
TISLKMIPRIDYDRIKARMSLKDWFAKRKKFKRPPQRLF

SEQ ID NO: 31771 - protein, 39 aa, Artificial Sequence
  Quasi-synthetic sequence derived from human genome
KSVLQFQNVRRVVQIFRIMRILRILKLARHSTGLQSLGF

SEQ ID NO: 31772 - protein, 39 aa, Artificial Sequence
  Quasi-synthetic sequence derived from human genome
GFKVAVIASIVSCAIILLMSMAFLTCCLLKCVKKSKRRR

SEQ ID NO: 31773 - protein, 39 aa, Artificial Sequence
  Quasi-synthetic sequence derived from human genome
KRLLPLLSLIFPTVLHGVLHYIISSVIQKFVLLILKRKT

SEQ ID NO: 31774 - protein, 39 aa, Artificial Sequence
  Quasi-synthetic sequence derived from human genome
WRQTRTLLLKNYLIKCRTKKSSVQEILFPLFFLFWLILI

SEQ ID NO: 31775 - protein, 39 aa, Artificial Sequence
  Quasi-synthetic sequence derived from human genome
GFKNLFYRTYMLFKNASGKRRFLLCLLLFTVITYFFVVI

SEQ ID NO: 31776 - protein, 39 aa, Artificial Sequence
  Quasi-synthetic sequence derived from human genome
MVLKTLTKPVTLSRSKINKTKVLKMIFVHLIIFCFCFVP

SEQ ID NO: 31777 - protein, 39 aa, Artificial Sequence
  Quasi-synthetic sequence derived from human genome
SKVRTLKKFIKLLGEIMEHRFKTYQQFRRCLTLRCKLYF

SEQ ID NO: 31778 - protein, 39 aa, Artificial Sequence
  Quasi-synthetic sequence derived from human genome
LCNKAFRDTFRLLLLCRWDKRRWRKIPKRPGSVHRTPSR

SEQ ID NO: 31779 - protein, 39 aa, Artificial Sequence
  Quasi-synthetic sequence derived from human genome
VLRCLRPLRIFKLVPQMRKVVRELFSGFKEIFLVSILLL

SEQ ID NO: 31780 - protein, 39 aa, Artificial Sequence
  Quasi-synthetic sequence derived from human genome
HVLIWIHCFTVYLVPCSIFFILNSIIVYKLRRKSNFRLR

SEQ ID NO: 31781 - protein, 39 aa, Artificial Sequence
  Quasi-synthetic sequence derived from human genome
RVLFYLGPVYLAGYLGLSITWLLLGALLWMWWRRNRRGK

SEQ ID NO: 31782 - protein, 39 aa, Artificial Sequence
  Quasi-synthetic sequence derived from human genome
LFRKPQRSFFGKLLREFRLVAADRRSWKILLFGVINLIC

SEQ ID NO: 31783 - protein, 39 aa, Artificial Sequence
  Quasi-synthetic sequence derived from human genome
KKQRLSKKLRRKLQMWLWSQTFCPVLYAWNDLGSRFWPR

SEQ ID NO: 31784 - protein, 39 aa, Artificial Sequence
  Quasi-synthetic sequence derived from human genome
CWKFFIDRIRRQLKVTLCFSPVGNKLRVRSRKFPAIVNC

SEQ ID NO: 31785 - protein, 39 aa, Artificial Sequence
  Quasi-synthetic sequence derived from human genome
FHYNRYLTRRRRIEIAHTLCLTERQIKIWFQNRRMKWKK

SEQ ID NO: 31786 - protein, 39 aa, Artificial Sequence
  Quasi-synthetic sequence derived from human genome
ISLRFKRTHIKMKKQPKGYGLRCHRAIITICRLIGIKDM

SEQ ID NO: 31787 - protein, 39 aa, Artificial Sequence
  Quasi-synthetic sequence derived from human genome
WKGFQTRKRLKKLPSAVIALQRSFRSKRSKMLLEINRQK

SEQ ID NO: 31788 - protein, 39 aa, Artificial Sequence
  Quasi-synthetic sequence derived from human genome
KKLWKKTPARKKRLREFVFCNKTQSKLLDKMTTSFWKRR

SEQ ID NO: 31789 - protein, 39 aa, Artificial Sequence
  Quasi-synthetic sequence derived from human genome
ILLVVAVFCILWNWNKRKKRQVPYLRVTVMPLLTLPQTR

SEQ ID NO: 31790 - protein, 39 aa, Artificial Sequence
  Quasi-synthetic sequence derived from human genome
KKPFSQHVRKLRASITPGTILIILTGRHRGKRVVFLKQL

SEQ ID NO: 31791 - protein, 39 aa, Artificial Sequence
  Quasi-synthetic sequence derived from human genome
FTIKRFLAKKQKQNRPIPQWIQMKPGSKIRYNSKRRHWR

SEQ ID NO: 31792 - protein, 39 aa, Artificial Sequence
  Quasi-synthetic sequence derived from human genome
KPKFPFLSIRRSALLYIALHLKAFNPKGSEYTRKKYKKK

SEQ ID NO: 31793 - protein, 39 aa, Artificial Sequence
  Quasi-synthetic sequence derived from human genome
PRHKKAYVVCTFVFGYLLPLLLICFCYAKVLNHLHKKLK

SEQ ID NO: 31794 - protein, 39 aa, Artificial Sequence
  Quasi-synthetic sequence derived from human genome
VIKIQSSYRRWMIRKRMREMHRAATFIQSTFRMHRLHMR

SEQ ID NO: 31795 - protein, 39 aa, Artificial Sequence
  Quasi-synthetic sequence derived from human genome
RRSRWPFSKARSFCKTHASLFKKILLGLLCLAYAAYLLA

SEQ ID NO: 31796 - protein, 39 aa, Artificial Sequence
  Quasi-synthetic sequence derived from human genome
FRWMRLRIRRMADAWIQAIKSLAEKQNLEKRKRKKVLVH

SEQ ID NO: 31797 - protein, 39 aa, Artificial Sequence
  Quasi-synthetic sequence derived from human genome
VLGKLKRNMMPWALQKKREIHMAKAHRRRAARSALPMRL

SEQ ID NO: 31798 - protein, 39 aa, Artificial Sequence
  Quasi-synthetic sequence derived from human genome
RMAPVLPSVLKLPVRSLTYFSARKGKRKTVKAVIDRFLR

SEQ ID NO: 31799 - protein, 39 aa, Artificial Sequence
  Quasi-synthetic sequence derived from human genome
ALRYYYNKRILHKTKGKRFTYKFNFSKLIVVNYPLWEVR

SEQ ID NO: 31800 - protein, 39 aa, Artificial Sequence
  Quasi-synthetic sequence derived from human genome
RTLMKMPNIKISRPLKVLLTVVIVFIVTQLPYNIVKFCR

SEQ ID NO: 31801 - protein, 39 aa, Artificial Sequence
  Quasi-synthetic sequence derived from human genome
RGRKNSRTMLLPLLRRFPEQVRVSLFHTPHLRGLLRLLI

SEQ ID NO: 31802 - protein, 39 aa, Artificial Sequence
  Quasi-synthetic sequence derived from human genome
LAAGTVASIILALVLLVVLLVVCGPLAYKKLVKKFRQKK

SEQ ID NO: 31803 - protein, 39 aa, Artificial Sequence
  Quasi-synthetic sequence derived from human genome
KYIQMQLTLLVGNHTQRTAILGLWKIARKWMRRKMGKWP

SEQ ID NO: 31804 - protein, 39 aa, Artificial Sequence
  Quasi-synthetic sequence derived from human genome
VPVGVGIAGALFILGALYSIKVMNRRRRNGFKRHKRKQR

SEQ ID NO: 31805 - protein, 39 aa, Artificial Sequence
  Quasi-synthetic sequence derived from human genome
LLRSGYPLRILLPLRGEWMGRRGLPRNLAPGPPRRRYRK

SEQ ID NO: 31806 - protein, 39 aa, Artificial Sequence
  Quasi-synthetic sequence derived from human genome
VCRPKKKGRKLLHEKAAQIKRRYAKPIGRPKNKLKQRLL

SEQ ID NO: 31807 - protein, 39 aa, Artificial Sequence
  Quasi-synthetic sequence derived from human genome
LGYLGLSFSWVLLALALLAWCRRSRGLKALRLCRALALL

SEQ ID NO: 31808 - protein, 39 aa, Artificial Sequence
  Quasi-synthetic sequence derived from human genome
RAGRPGLGAGLRLPRLLSPPLRPRLLLLLLLLSPPLLLL

SEQ ID NO: 31809 - protein, 39 aa, Artificial Sequence
  Quasi-synthetic sequence derived from human genome
VRLWKVLALVFGFATCATLFFILRKQYLQRQERLRLKQM

SEQ ID NO: 31810 - protein, 39 aa, Artificial Sequence
  Quasi-synthetic sequence derived from human genome
MNRLRNAKIYVERAVKQKKIFTIQGCYPVIRCLLRRRGW

SEQ ID NO: 31811 - protein, 39 aa, Artificial Sequence
  Quasi-synthetic sequence derived from human genome
KFKKFAARKKWKQSVRLISLCQRLSRSFLSRSNMSVARS

SEQ ID NO: 31812 - protein, 39 aa, Artificial Sequence
  Quasi-synthetic sequence derived from human genome
FRIIQTLFSCKNHKKAKAIKLILLVVIVFFLFWTPYNVM

SEQ ID NO: 31813 - protein, 39 aa, Artificial Sequence
  Quasi-synthetic sequence derived from human genome
RALHRLHQFQQLLWVLGLLVGLLLLLLGLGACYTWRRRR

SEQ ID NO: 31814 - protein, 39 aa, Artificial Sequence
  Quasi-synthetic sequence derived from human genome
KVAVKILNRQKIRSLDVVGKIRREIQNLKLFRHPHIIKL

SEQ ID NO: 31815 - protein, 39 aa, Artificial Sequence
  Quasi-synthetic sequence derived from human genome
LRSVWNFLKRHKKKCIFLGTVLGGVYILGKYGQKKIREI

SEQ ID NO: 31816 - protein, 39 aa, Artificial Sequence
  Quasi-synthetic sequence derived from human genome
FGRRVLCYPLYRHFKLVMKAYRDTIKILQLGKSAVLKCL

SEQ ID NO: 31817 - protein, 39 aa, Artificial Sequence
  Quasi-synthetic sequence derived from human genome
RGRLSPVPVPRAVPVKRPRVTVPLVRRVKTNVPVKLFAR

SEQ ID NO: 31818 - protein, 39 aa, Artificial Sequence
  Quasi-synthetic sequence derived from human genome
IPRKRGKNPMKAVGLAWYSLYTRTWLGYLFYRQQLRRAR

SEQ ID NO: 31819 - protein, 39 aa, Artificial Sequence
  Quasi-synthetic sequence derived from human genome
CPRVQVGVGSHAAAKRWLGRWRRKRRWRRVRKAGPRDLL

SEQ ID NO: 31820 - protein, 39 aa, Artificial Sequence
  Quasi-synthetic sequence derived from human genome
HSKPMRWPFFLFIPFFIIFCVLIAIMVKVNFQRKKWRTE

SEQ ID NO: 31821 - protein, 39 aa, Artificial Sequence
  Quasi-synthetic sequence derived from human genome
WFQFYLTFPLIFGLFIILLVIFLIWRCFLRNKTRRQTVT

SEQ ID NO: 31822 - protein, 39 aa, Artificial Sequence
  Quasi-synthetic sequence derived from human genome
YLAVIGRMRTRLVRKRFLCLGWGLPALVVAVSVGFTRTK

SEQ ID NO: 31823 - protein, 39 aa, Artificial Sequence
  Quasi-synthetic sequence derived from human genome
LLVILACVLWKKRIKPIVWPSLPDHKKTLEHLCKKPRKV

SEQ ID NO: 31824 - protein, 39 aa, Artificial Sequence
  Quasi-synthetic sequence derived from human genome
FCCLLFSMCNLFCSLLFIIPKKLMIFLRTVIRLERKTPR

SEQ ID NO: 31825 - protein, 39 aa, Artificial Sequence
  Quasi-synthetic sequence derived from human genome
LKLLKSHRVLKWKADKSLSYNSRFWKNLLYLMPAKTVKP

SEQ ID NO: 31826 - protein, 39 aa, Artificial Sequence
  Quasi-synthetic sequence derived from human genome
IRRFIFLFFILVIGIYPSGHSLILILGNPKLKQNAKKFL

SEQ ID NO: 31827 - protein, 39 aa, Artificial Sequence
  Quasi-synthetic sequence derived from human genome
LHKDSQQKTVKKKIKPTLPLRIFINVSRFFCVQLKKMVR

SEQ ID NO: 31828 - protein, 39 aa, Artificial Sequence
  Quasi-synthetic sequence derived from human genome
RSSRQSSFIAVGILGVVLLAIFVALFFLTKKRRQRQRLA

SEQ ID NO: 31829 - protein, 39 aa, Artificial Sequence
  Quasi-synthetic sequence derived from human genome
CFLRRPGAPASWIWWRMLRQVLRRGLQSFCHRLGLCVSR

SEQ ID NO: 31830 - protein, 39 aa, Artificial Sequence
  Quasi-synthetic sequence derived from human genome
RFHKTRSRMTHRTPKVKKSPKVRKKSYLSRLMLSNRLPF

SEQ ID NO: 31831 - protein, 39 aa, Artificial Sequence
  Quasi-synthetic sequence derived from human genome
VCKLQRNRLAKTKKPFKIIVTIIITFFLCWCPYHTLNLL

SEQ ID NO: 31832 - protein, 39 aa, Artificial Sequence
  Quasi-synthetic sequence derived from human genome
FHYNRYLTRRRRIEIAHSLCLSERQIKIWFQNRRMKWKK

SEQ ID NO: 31833 - protein, 39 aa, Artificial Sequence
  Quasi-synthetic sequence derived from human genome
KFLRFRRSLLLLVKHSCVESLFLVRNFCILYYFLGYIPK

SEQ ID NO: 31834 - protein, 39 aa, Artificial Sequence
  Quasi-synthetic sequence derived from human genome
AVPRPRGKLAGLLRTFMRSRPSRQRLRQRGILRQRVFGC

SEQ ID NO: 31835 - protein, 39 aa, Artificial Sequence
  Quasi-synthetic sequence derived from human genome
LLLLAMWGPQAPPCLCRKRGRGACIKCERLRPRIRRRGL

SEQ ID NO: 31836 - protein, 39 aa, Artificial Sequence
  Quasi-synthetic sequence derived from human genome
RCCVRALSIQRLWYFWFLLMMGVLFCCGAGFFIRRRMYP

SEQ ID NO: 31837 - protein, 39 aa, Artificial Sequence
  Quasi-synthetic sequence derived from human genome
QVYKVGIYGWRKRCLYFFVLLLMILILVNLAMTIWILKV

SEQ ID NO: 31838 - protein, 39 aa, Artificial Sequence
  Quasi-synthetic sequence derived from human genome
YRKQIFILLFQRLQNSKTTKFIKSFLVFINLYCIKYGAL

SEQ ID NO: 31839 - protein, 39 aa, Artificial Sequence
  Quasi-synthetic sequence derived from human genome
RKKRRRSRLVLYPETSRKYRPRVEHRSRAQRCLLLLVAI

SEQ ID NO: 31840 - protein, 39 aa, Artificial Sequence
  Quasi-synthetic sequence derived from human genome
KFYLFPLKMITWTMPTAVFFICMILLITSLGRHRKKALL

SEQ ID NO: 31841 - protein, 39 aa, Artificial Sequence
  Quasi-synthetic sequence derived from human genome
PAAAAPRASGRCVIAPVRAVLRLRRRVCVLRKRRLLQPG

SEQ ID NO: 31842 - protein, 39 aa, Artificial Sequence
  Quasi-synthetic sequence derived from human genome
ARRELKRLKEEARRKHAVAVIWAYWLGLKVRREYRKFFR

SEQ ID NO: 31843 - protein, 39 aa, Artificial Sequence
  Quasi-synthetic sequence derived from human genome
RYYRLAPMRLYTLSKRHFVLVFVVFFICFGLTIFVGIRG

SEQ ID NO: 31844 - protein, 39 aa, Artificial Sequence
  Quasi-synthetic sequence derived from human genome
RLLMSLFLFFFVLFLCLFFYNCYKGYLPRQCLKFRSALL

SEQ ID NO: 31845 - protein, 39 aa, Artificial Sequence
  Quasi-synthetic sequence derived from human genome
SWGKVSLFWGWARHRSLCFLVVACLKVKTCLVCRFRISL

SEQ ID NO: 31846 - protein, 39 aa, Artificial Sequence
  Quasi-synthetic sequence derived from human genome
ALMASMARRASRGPIAFWARRASRTRLAAWARRALLSLR

SEQ ID NO: 31847 - protein, 39 aa, Artificial Sequence
  Quasi-synthetic sequence derived from human genome
RTKRKPSIKAARAKKIFGWGDFYFRVHTLKFSLLVTGKI

SEQ ID NO: 31848 - protein, 39 aa, Artificial Sequence
  Quasi-synthetic sequence derived from human genome
RKLLMLKKEKLEKVQNKAASLIQGYWRRYSTRQRFLKLK

SEQ ID NO: 31849 - protein, 39 aa, Artificial Sequence
  Quasi-synthetic sequence derived from human genome
RVSLVWIFFFLLCVAERTYKQRLLFAKLFGHLTSARRAR

SEQ ID NO: 31850 - protein, 39 aa, Artificial Sequence
  Quasi-synthetic sequence derived from human genome
WLLFLAHRVALAALPCRRGSRGFGMFYAVRRGRKTGVFL

SEQ ID NO: 31851 - protein, 39 aa, Artificial Sequence
  Quasi-synthetic sequence derived from human genome
LRRLFNLCKRCHRQPRFRLPKERSLSYWWNRIQSLLYCG

SEQ ID NO: 31852 - protein, 39 aa, Artificial Sequence
  Quasi-synthetic sequence derived from human genome
VLLPAVNIRRRIKLTFPQPARPRAPRSLCLWQTWFAGKR

SEQ ID NO: 31853 - protein, 39 aa, Artificial Sequence
  Quasi-synthetic sequence derived from human genome
QTLKWKIFTNFKMNILGLLIPFTIFMFCYIKILHQLKRC

SEQ ID NO: 31854 - protein, 39 aa, Artificial Sequence
  Quasi-synthetic sequence derived from human genome
LKSIKTRLGRRVPAAPPALRRNLLLQAWKCVCNWASRLF

SEQ ID NO: 31855 - protein, 39 aa, Artificial Sequence
  Quasi-synthetic sequence derived from human genome
ALKHTIKLLTVIKWHGPKCNKLNSKFWKRLQYEMPFKRI

SEQ ID NO: 31856 - protein, 39 aa, Artificial Sequence
  Quasi-synthetic sequence derived from human genome
ILVWKNWLGVKRQPLWTLVLILWPVIIFIILAITRTKFP

SEQ ID NO: 31857 - protein, 39 aa, Artificial Sequence
  Quasi-synthetic sequence derived from human genome
LLRSARRRRRGRTDGRRFLLRRAVPGHLGLARARVERAW

SEQ ID NO: 31858 - protein, 39 aa, Artificial Sequence
  Quasi-synthetic sequence derived from human genome
LFCLQYLGVRVLLRFQRKLSVLLLLLGRRRVDFRLVNEL

SEQ ID NO: 31859 - protein, 39 aa, Artificial Sequence
  Quasi-synthetic sequence derived from human genome
KCGGKCALVRHKFNRLPRVLILHLKRYSFNVALSLNNKI

SEQ ID NO: 31860 - protein, 39 aa, Artificial Sequence
  Quasi-synthetic sequence derived from human genome
LLSLQRCLAVTRPFLAPRLRSPALARRLLLAVWLAALLL

SEQ ID NO: 31861 - protein, 39 aa, Artificial Sequence
  Quasi-synthetic sequence derived from human genome
RWIVGKVIGTKMQKTAKVRVTRLVLDPYLLKYFNKRKTY

SEQ ID NO: 31862 - protein, 39 aa, Artificial Sequence
  Quasi-synthetic sequence derived from human genome
KTNRIARILAGSKKKICTKKPRFMSACAQLVIAFILICI

SEQ ID NO: 31863 - protein, 39 aa, Artificial Sequence
  Quasi-synthetic sequence derived from human genome
ACIKMQKTIRMWLCKRRHKPRIDGLVKVGTLKKRLDKFN

SEQ ID NO: 31864 - protein, 39 aa, Artificial Sequence
  Quasi-synthetic sequence derived from human genome
KVAVKILNRQKIRSLDVVGKIKREIQNLKLFRHPHIIKL

SEQ ID NO: 31865 - protein, 39 aa, Artificial Sequence
  Quasi-synthetic sequence derived from human genome
VSTWLAIILLIFISLFPEILLIVLKNVRRRSARVTKRLP

SEQ ID NO: 31866 - protein, 39 aa, Artificial Sequence
  Quasi-synthetic sequence derived from human genome
LRRLQSLPKCERLPLPSFLLLPFQRITRLRMLLQNILRQ

SEQ ID NO: 31867 - protein, 39 aa, Artificial Sequence
  Quasi-synthetic sequence derived from human genome
MSIRRLLILILKIGRRWTELIRTMESRVLLRTFCLIFGL

SEQ ID NO: 31868 - protein, 39 aa, Artificial Sequence
  Quasi-synthetic sequence derived from human genome
RLLPAQIEKWKLKQKKKLERKKLIKDMKAKIRVDTIAKR

SEQ ID NO: 31869 - protein, 39 aa, Artificial Sequence
  Quasi-synthetic sequence derived from human genome
KSLVYGLVGAGVVLMLIILVALLMLVFRSKREVKRQKYR

SEQ ID NO: 31870 - protein, 39 aa, Artificial Sequence
  Quasi-synthetic sequence derived from human genome
YRAKRTPKRAGIMIGLAWLISFILWAPAILCWQYLVGKR

SEQ ID NO: 31871 - protein, 39 aa, Artificial Sequence
  Quasi-synthetic sequence derived from human genome
RSNAPNIPKLNRFLLLFIGFVCVLLSFFMARVFMRMKLP

SEQ ID NO: 31872 - protein, 39 aa, Artificial Sequence
  Quasi-synthetic sequence derived from human genome
RSLLVLRLCAWPALLARHEQLLYVSRKLLGQRLFNKLMK

SEQ ID NO: 31873 - protein, 39 aa, Artificial Sequence
  Quasi-synthetic sequence derived from human genome
AFNALRRALRHDLGGKRLSKIATLRRAIHRIAALSLVLR

SEQ ID NO: 31874 - protein, 39 aa, Artificial Sequence
  Quasi-synthetic sequence derived from human genome
YLKIVLDTFVYQIPRRIFIQLMKRFGLKATTKINWKQFL

SEQ ID NO: 31875 - protein, 39 aa, Artificial Sequence
  Quasi-synthetic sequence derived from human genome
MLTIFLVLLFSQYARNVKFPLPIYKSKKGWTAYKLQLFK

SEQ ID NO: 31876 - protein, 39 aa, Artificial Sequence
  Quasi-synthetic sequence derived from human genome
MLCAISLCARVRKLRSAGRCGKFHQVRRVMTILFLTMVI

SEQ ID NO: 31877 - protein, 39 aa, Artificial Sequence
  Quasi-synthetic sequence derived from human genome
LPINPTIIRIMRVLRIARVLKLLKMAVGMRALLDTLWAW

SEQ ID NO: 31878 - protein, 39 aa, Artificial Sequence
  Quasi-synthetic sequence derived from human genome
LVFRKFQVWRLVTNFLFFGPLGFSFFFNMLFVFRYCRML

SEQ ID NO: 31879 - protein, 39 aa, Artificial Sequence
  Quasi-synthetic sequence derived from human genome
FLLSRKILRLITIRKLFTAIGVLFPSVILVSLPWVRSSH

SEQ ID NO: 31880 - protein, 39 aa, Artificial Sequence
  Quasi-synthetic sequence derived from human genome
RRQRKLHFVVGGFAYLLPKTAVVLRCPARRVRKPLITWE

SEQ ID NO: 31881 - protein, 39 aa, Artificial Sequence
  Quasi-synthetic sequence derived from human genome
FLITFLFGMVVLALVVWKIFTLSRATAVKERGKNRKKVL

SEQ ID NO: 31882 - protein, 39 aa, Artificial Sequence
  Quasi-synthetic sequence derived from human genome
VGSRRGFFTKLPPAERRYFKRVVLAARTKRGHLVLKSFK

SEQ ID NO: 31883 - protein, 39 aa, Artificial Sequence
  Quasi-synthetic sequence derived from human genome
SLDVIAFLLACVATMIFMITKCCLFCFRKLAKTGKKKKR

SEQ ID NO: 31884 - protein, 39 aa, Artificial Sequence
  Quasi-synthetic sequence derived from human genome
RRPRGSTARTLLRLLLRLLLFLGLLALALHFLGLQPLHA

SEQ ID NO: 31885 - protein, 39 aa, Artificial Sequence
  Quasi-synthetic sequence derived from human genome
RFKRSYNYKTIVKKILAKLKRARSKKLDNFQSEKKVFKK

SEQ ID NO: 31886 - protein, 39 aa, Artificial Sequence
  Quasi-synthetic sequence derived from human genome
FCILWNWNKRKKRQVPYLRVTVMPLLTLPQTRQRAKNIY

SEQ ID NO: 31887 - protein, 39 aa, Artificial Sequence
  Quasi-synthetic sequence derived from human genome
RFSLAVLYQACCVALLLWLALLLSIQRRLPRERKIKYSK

SEQ ID NO: 31888 - protein, 39 aa, Artificial Sequence
  Quasi-synthetic sequence derived from human genome
WLWTSFNTAFLALQSLRFGFGFRRGRSFLLRSWHHLMKR

SEQ ID NO: 31889 - protein, 39 aa, Artificial Sequence
  Quasi-synthetic sequence derived from human genome
FLHLKRRVKSVILVMLLGPLLFLACQLFVINMKEIVRTK

SEQ ID NO: 31890 - protein, 39 aa, Artificial Sequence
  Quasi-synthetic sequence derived from human genome
WLVRKRFLEQRAKIRLLHFTAAAYYHLNAVRIQRAYKLY

SEQ ID NO: 31891 - protein, 39 aa, Artificial Sequence
  Quasi-synthetic sequence derived from human genome
LTRLTFFFLIPLFIMIGCYLVIIHNLLHGRTSKLKPKVK

SEQ ID NO: 31892 - protein, 39 aa, Artificial Sequence
  Quasi-synthetic sequence derived from human genome
MFRKPYVRRRPSKRRGARAFRCIKPAPVIHPASVIFTVP

SEQ ID NO: 31893 - protein, 39 aa, Artificial Sequence
  Quasi-synthetic sequence derived from human genome
KSWLIYVVVRRTKLQMQTTALEFRQRIILRVWWSTWRQR

SEQ ID NO: 31894 - protein, 39 aa, Artificial Sequence
  Quasi-synthetic sequence derived from human genome
ARLWGRRKCKPQMNYDKLSRALRYYYNKRILHKTKGKRF

SEQ ID NO: 31895 - protein, 39 aa, Artificial Sequence
  Quasi-synthetic sequence derived from human genome
KKVINKGLFFLGSLIAISSTYLLIHYMSPRSFLRLRRPW

SEQ ID NO: 31896 - protein, 39 aa, Artificial Sequence
  Quasi-synthetic sequence derived from human genome
FNVIPSPKSLWYLIKWIWTHLCKKKMRRKPESFGTIGRR

SEQ ID NO: 31897 - protein, 39 aa, Artificial Sequence
  Quasi-synthetic sequence derived from human genome
RFFASVLIRRIHKVDIPSIITKKLLKAAMKHIEVIVKAR

SEQ ID NO: 31898 - protein, 39 aa, Artificial Sequence
  Quasi-synthetic sequence derived from human genome
RGRALGGRAVRSRRAIAVLSRWPAFPAFRAFLTFLYRYS

SEQ ID NO: 31899 - protein, 39 aa, Artificial Sequence
  Quasi-synthetic sequence derived from human genome
LPRVVHLFMSYVYLLVPPLMNPIIYSIKTKQIRQRIIKK

SEQ ID NO: 31900 - protein, 39 aa, Artificial Sequence
  Quasi-synthetic sequence derived from human genome
MRRAKRIRNAALQHLFIRKSFRPFKCLQCGKAFREKDKL

SEQ ID NO: 31901 - protein, 39 aa, Artificial Sequence
  Quasi-synthetic sequence derived from human genome
LASKLAPAMKTQKLRYRRCSSELLPMAKSYKRLRYKRLL

SEQ ID NO: 31902 - protein, 39 aa, Artificial Sequence
  Quasi-synthetic sequence derived from human genome
YTFILGFLVPLTIICLCYLFIIIKVKSSGIRVGSSKRKK

SEQ ID NO: 31903 - protein, 39 aa, Artificial Sequence
  Quasi-synthetic sequence derived from human genome
RMRRYRMTHSEKKRLKQCNVITRLRGLQVPVGLPFLLIL

SEQ ID NO: 31904 - protein, 39 aa, Artificial Sequence
  Quasi-synthetic sequence derived from human genome
KLRLDKLRQSCVMVQKHMRGWLQRKKFLRERRAALIIQQ

SEQ ID NO: 31905 - protein, 39 aa, Artificial Sequence
  Quasi-synthetic sequence derived from human genome
VIGFLLAVVLTVAFITFKCCAYGYRKCLGKKGRVKKAHK

SEQ ID NO: 31906 - protein, 39 aa, Artificial Sequence
  Quasi-synthetic sequence derived from human genome
RPKRYFTIVIISSSLLLGLIVLLLISYVMWKAGFFKRQY

SEQ ID NO: 31907 - protein, 39 aa, Artificial Sequence
  Quasi-synthetic sequence derived from human genome
RHMYHSLYLKVKGNVFKNKRILMEHIHKLKADKARKKLL

SEQ ID NO: 31908 - protein, 39 aa, Artificial Sequence
  Quasi-synthetic sequence derived from human genome
ALASCTRCLNKIMKTRVCRRLRRANRVLRARCRRAVKSN

SEQ ID NO: 31909 - protein, 39 aa, Artificial Sequence
  Quasi-synthetic sequence derived from human genome
AVMRRHCRTLRQRSRRPKMRPARRRGGRRQLLLRALDAV

SEQ ID NO: 31910 - protein, 39 aa, Artificial Sequence
  Quasi-synthetic sequence derived from human genome
KQNIFHFLYRKNRSRIPLLRKPWFQLGHSMNPRARKNRS

SEQ ID NO: 31911 - protein, 39 aa, Artificial Sequence
  Quasi-synthetic sequence derived from human genome
SYLHILFSLYTRTLYLRYRPKVKFLFGIWPVILFEPLRK

SEQ ID NO: 31912 - protein, 39 aa, Artificial Sequence
  Quasi-synthetic sequence derived from human genome
WPPYKKRTSLHPSYKGLMRLLHCKTLHIVLFTLLYKILM

SEQ ID NO: 31913 - protein, 39 aa, Artificial Sequence
  Quasi-synthetic sequence derived from human genome
FSFPKFSRLRRGLKAEAVKGPVPAAPARRRLQLPRLRVR

SEQ ID NO: 31914 - protein, 39 aa, Artificial Sequence
  Quasi-synthetic sequence derived from human genome
RWFRRRRNQDRPSLLKKFREASWRFTFYLIAFIAGMAVI

SEQ ID NO: 31915 - protein, 39 aa, Artificial Sequence
  Quasi-synthetic sequence derived from human genome
HTVFLLAILGGMAFILLVLLCLLLYYCRRKCLKPRQHHR

SEQ ID NO: 31916 - protein, 39 aa, Artificial Sequence
  Quasi-synthetic sequence derived from human genome
TMAPWVKVVFLEKLPALLFMQQPRHHCARQRLRLRRRQR

SEQ ID NO: 31917 - protein, 39 aa, Artificial Sequence
  Quasi-synthetic sequence derived from human genome
KLCRKKPKARQFFLFNDILVYGNIVIQKKKYNKQHIIPL

SEQ ID NO: 31918 - protein, 39 aa, Artificial Sequence
  Quasi-synthetic sequence derived from human genome
WRTSLLIALGTLLALVCVFVICRRYLVMQRLFPRIPHMK

SEQ ID NO: 31919 - protein, 39 aa, Artificial Sequence
  Quasi-synthetic sequence derived from human genome
VSSWLVWGVILFVYLVIRALRLWRTAKLQVTLKKYSVHL

SEQ ID NO: 31920 - protein, 39 aa, Artificial Sequence
  Quasi-synthetic sequence derived from human genome
FLKVIGKGNYGKVLLAKRKSDGAFYAVKVLQKKSILKKK

SEQ ID NO: 31921 - protein, 39 aa, Artificial Sequence
  Quasi-synthetic sequence derived from human genome
KLFIAPLIMVLGLALGAIAVVIGLFVFPIYCLCKKQRKR

SEQ ID NO: 31922 - protein, 39 aa, Artificial Sequence
  Quasi-synthetic sequence derived from human genome
WTSFRDFFFSRGRFSSGFRRTLILSSGFRLVKKKLYSLI

SEQ ID NO: 31923 - protein, 39 aa, Artificial Sequence
  Quasi-synthetic sequence derived from human genome
PRPTPRRPRPRLARPRAGQKPWLLVIRSMERVMYVMLII

SEQ ID NO: 31924 - protein, 39 aa, Artificial Sequence
  Quasi-synthetic sequence derived from human genome
KKLPPVIIKYIIINRFRGRKNMLVKLGKIDSKEKQVILT

SEQ ID NO: 31925 - protein, 39 aa, Artificial Sequence
  Quasi-synthetic sequence derived from human genome
RQRLRFGPRRALAALVRRGWRCGYLECSAKYNWHVLRLF

SEQ ID NO: 31926 - protein, 39 aa, Artificial Sequence
  Quasi-synthetic sequence derived from human genome
PSRRRQAGRRLRYLPTGSFPFLLLLLLLCIQLGGGQKKK

SEQ ID NO: 31927 - protein, 39 aa, Artificial Sequence
  Quasi-synthetic sequence derived from human genome
RVSGVLRLLALIFAIVTTWMFIRSYMSFSMKTIRLPRWL

SEQ ID NO: 31928 - protein, 39 aa, Artificial Sequence
  Quasi-synthetic sequence derived from human genome
ALKLRSWPLTVLYYLLPFGALRPLSRVGWRPVSRVALYK

SEQ ID NO: 31929 - protein, 39 aa, Artificial Sequence
  Quasi-synthetic sequence derived from human genome
LVPYRCFKRRFPGISRSTYYNWRRKALRRNPSFKPAPAL

SEQ ID NO: 31930 - protein, 39 aa, Artificial Sequence
  Quasi-synthetic sequence derived from human genome
FYKFINLNRYKIRHTRKKPFKCKNCVKSFCMFSHKTQHK

SEQ ID NO: 31931 - protein, 39 aa, Artificial Sequence
  Quasi-synthetic sequence derived from human genome
RRTAVIVQQKLRSSLLTKKQDQAARKIMRFLRRCRHRVK

SEQ ID NO: 31932 - protein, 39 aa, Artificial Sequence
  Quasi-synthetic sequence derived from human genome
KLIRSVFMGLRTRRLGTRGNSKYHYYGLRIKASSPLLRL

SEQ ID NO: 31933 - protein, 39 aa, Artificial Sequence
  Quasi-synthetic sequence derived from human genome
WWRFLVIWILFSAVTAFVTFRATRKPLVQTTPRLVYKWF

SEQ ID NO: 31934 - protein, 39 aa, Artificial Sequence
  Quasi-synthetic sequence derived from human genome
RKKWVDLAWMITFYVRFFLTYVPLLGLKAFLGLFFIVRF

SEQ ID NO: 31935 - protein, 39 aa, Artificial Sequence
  Quasi-synthetic sequence derived from human genome
CSPITLGLLVAGVLVLLVSLGVAIHLCCRRRRARLRFMK

SEQ ID NO: 31936 - protein, 39 aa, Artificial Sequence
  Quasi-synthetic sequence derived from human genome
RLLGGRDALFTIQWNIRAFNAVKNWSWMKLFFKMKPLLR

SEQ ID NO: 31937 - protein, 39 aa, Artificial Sequence
  Quasi-synthetic sequence derived from human genome
KSKKICPLYWYKFAKTFLIWNCSPCWLKLKEFVHRIIMA

SEQ ID NO: 31938 - protein, 39 aa, Artificial Sequence
  Quasi-synthetic sequence derived from human genome
FRVAKKRAPKVLGTTLVVGLLAGVGYFAFMLFRKRLGSM

SEQ ID NO: 31939 - protein, 39 aa, Artificial Sequence
  Quasi-synthetic sequence derived from human genome
LRIPREHVHNASAHLTFNKFWRRYGKLSRHLMKVKLKKY

SEQ ID NO: 31940 - protein, 39 aa, Artificial Sequence
  Quasi-synthetic sequence derived from human genome
FMLKKRKWPLKGWHKRFFVLDNGMLKYSKAPLDIQKGKV

SEQ ID NO: 31941 - protein, 39 aa, Artificial Sequence
  Quasi-synthetic sequence derived from human genome
KTLKYLLLGRWRKKHLTFRILNLPSTLPPHTARAALRQA

SEQ ID NO: 31942 - protein, 39 aa, Artificial Sequence
  Quasi-synthetic sequence derived from human genome
LLRKRYRHRPCRLQFLLLLLMLGCVLMMVAMLHPPHHTL

SEQ ID NO: 31943 - protein, 39 aa, Artificial Sequence
  Quasi-synthetic sequence derived from human genome
LVIRAAVAGFFAVLFLWRSFRSVTSRLYVRREKKFAVAL

SEQ ID NO: 31944 - protein, 39 aa, Artificial Sequence
  Quasi-synthetic sequence derived from human genome
KFMVLLWKNFILKRRRCIALVVEMVLTFLFSAALLATRS

SEQ ID NO: 31945 - protein, 39 aa, Artificial Sequence
  Quasi-synthetic sequence derived from human genome
LMAHPFLLLILLCMSLLLFQVIRLYQRRRWTIRAMHLFP

SEQ ID NO: 31946 - protein, 39 aa, Artificial Sequence
  Quasi-synthetic sequence derived from human genome
FLLKPVFLQRNLKKFRRRWQSEQARALRGEARSSWKRLV

SEQ ID NO: 31947 - protein, 39 aa, Artificial Sequence
  Quasi-synthetic sequence derived from human genome
RRPRIHFRFPNRPFVPSRCNHRFPFQPFYWPHRYLTYRY

SEQ ID NO: 31948 - protein, 39 aa, Artificial Sequence
  Quasi-synthetic sequence derived from human genome
MKMMLVRRFRVLILMVFLVACALHIALDLLPRLERRGAR

SEQ ID NO: 31949 - protein, 39 aa, Artificial Sequence
  Quasi-synthetic sequence derived from human genome
KNIIRTKMFLYLSDLSRKDRRIVSKKYKIYFWNIITIAV

SEQ ID NO: 31950 - protein, 39 aa, Artificial Sequence
  Quasi-synthetic sequence derived from human genome
KPIFRKKAKTTKKIVLRLECVEPNCRSKRMLAIKRCKHF

SEQ ID NO: 31951 - protein, 39 aa, Artificial Sequence
  Quasi-synthetic sequence derived from human genome
IKKIKKVQSFLRGWLCRRKWKTIIQDYIRSPHADSMRKR

SEQ ID NO: 31952 - protein, 39 aa, Artificial Sequence
  Quasi-synthetic sequence derived from human genome
LVKDAKICAFLLRKKRFGQWTKLLCVIKDTKLLCYKSSK

SEQ ID NO: 31953 - protein, 39 aa, Artificial Sequence
  Quasi-synthetic sequence derived from human genome
VMRFLLRVRCWQYRQLSALHRAPRPTRPDKARRLGYKAK

SEQ ID NO: 31954 - protein, 39 aa, Artificial Sequence
  Quasi-synthetic sequence derived from human genome
RGKFVSLFYTVVTPALNPLIYTLRNKKVKGAARRLLRSL

SEQ ID NO: 31955 - protein, 39 aa, Artificial Sequence
  Quasi-synthetic sequence derived from human genome
KKTFIVLNKGKAISRFSATPALYILTPFNPIRKLAIKIL

SEQ ID NO: 31956 - protein, 39 aa, Artificial Sequence
  Quasi-synthetic sequence derived from human genome
KYIHKRWALVWLACLLFAAALSLILLLKKDHAKAAARGR

SEQ ID NO: 31957 - protein, 39 aa, Artificial Sequence
  Quasi-synthetic sequence derived from human genome
CWKFFIEKVRRQLKVILCFSPVGSVLRVRARKFPAVVNC

SEQ ID NO: 31958 - protein, 39 aa, Artificial Sequence
  Quasi-synthetic sequence derived from human genome
RLFHALFFKMAVTYSRLFPPAFRRLFEFFVLLKALFVLF

SEQ ID NO: 31959 - protein, 39 aa, Artificial Sequence
  Quasi-synthetic sequence derived from human genome
KLYPGWARAACVLLSLLPVLWVPVAALAQLLTRRRRTWR

SEQ ID NO: 31960 - protein, 39 aa, Artificial Sequence
  Quasi-synthetic sequence derived from human genome
VKRIRVLVIRKLVRSVGRLKSKKGTEDALLKNQRRAQRL

SEQ ID NO: 31961 - protein, 39 aa, Artificial Sequence
  Quasi-synthetic sequence derived from human genome
KAIKEKKIFSIYGHYPVVRAALRRKGWVEKKFHFLPKVI

SEQ ID NO: 31962 - protein, 39 aa, Artificial Sequence
  Quasi-synthetic sequence derived from human genome
ITVVGYFCVIFLLNVSMFIVVLVQLCRIKKKKQLGAQRK

SEQ ID NO: 31963 - protein, 39 aa, Artificial Sequence
  Quasi-synthetic sequence derived from human genome
PRLLSRVQPRAPCLRRLWGRGARPEVAGRRRAWAWGWRR

SEQ ID NO: 31964 - protein, 39 aa, Artificial Sequence
  Quasi-synthetic sequence derived from human genome
WFVLKVVLIIIRLKKYEKRGELVTVLDKFLSHAKRQPRK

SEQ ID NO: 31965 - protein, 39 aa, Artificial Sequence
  Quasi-synthetic sequence derived from human genome
IFLMLINVDRYAAIVHPLRLRHLRRPRVARLLCLGVWAL

SEQ ID NO: 31966 - protein, 39 aa, Artificial Sequence
  Quasi-synthetic sequence derived from human genome
RNGGPLIPKKFQLNQHRRIKLSPLMMYEKLSMIRFRYRI

SEQ ID NO: 31967 - protein, 39 aa, Artificial Sequence
  Quasi-synthetic sequence derived from human genome
AGMALLRLFRMLRIFKLGKYWPTFQILMWSLSNSWVALK

SEQ ID NO: 31968 - protein, 39 aa, Artificial Sequence
  Quasi-synthetic sequence derived from human genome
RICSKLKAVLQKQGIWSEIHFILTNPRSLKHLCRLKIRK

SEQ ID NO: 31969 - protein, 39 aa, Artificial Sequence
  Quasi-synthetic sequence derived from human genome
MIKLKRGTKGLVRLFYLDEHRTRLRWRPSRKSEKAKILI

SEQ ID NO: 31970 - protein, 39 aa, Artificial Sequence
  Quasi-synthetic sequence derived from human genome
KLRNIRYGFNTILVILIWRIFIARSQMARNIWYFVVSLC

SEQ ID NO: 31971 - protein, 39 aa, Artificial Sequence
  Quasi-synthetic sequence derived from human genome
LLHMTALSVERYLAICRPLRARVLVTRRRVRALIAVLWA

SEQ ID NO: 31972 - protein, 39 aa, Artificial Sequence
  Quasi-synthetic sequence derived from human genome
RLVWKEVILRKILILVLVQKDVSLTTQYFLQKARSRRHR

SEQ ID NO: 31973 - protein, 39 aa, Artificial Sequence
  Quasi-synthetic sequence derived from human genome
QLLLILRGQTRHQVRKGVAVRARPWRKNLQEVFGKRWLL

SEQ ID NO: 31974 - protein, 39 aa, Artificial Sequence
  Quasi-synthetic sequence derived from human genome
RARRKKSSARKFGLQKLWEWCLGLVQMSSLPWRVVIGRL

SEQ ID NO: 31975 - protein, 39 aa, Artificial Sequence
  Quasi-synthetic sequence derived from human genome
RRFRRWLNRYSYTVLSSWPERALISLKNRSRFLVRPNTR

SEQ ID NO: 31976 - protein, 39 aa, Artificial Sequence
  Quasi-synthetic sequence derived from human genome
KMVGPGFLSLGLMMLVCGLVWVPIIKKKQKHRQKSNFLR

SEQ ID NO: 31977 - protein, 39 aa, Artificial Sequence
  Quasi-synthetic sequence derived from human genome
IFMFCYIKILHQLKRCQNHNKTKAIRLVLIVVIASLLFW

SEQ ID NO: 31978 - protein, 39 aa, Artificial Sequence
  Quasi-synthetic sequence derived from human genome
KMVWRINPAHRKLQARLDQMRKFRRQHEQLRAVIVRVLR

SEQ ID NO: 31979 - protein, 39 aa, Artificial Sequence
  Quasi-synthetic sequence derived from human genome
RPGRRWPASPLGMKVFRRKALVLCAGYALLLVLTMLNLL

SEQ ID NO: 31980 - protein, 39 aa, Artificial Sequence
  Quasi-synthetic sequence derived from human genome
LGQKLLKKIGISWNKKYRKQHGPLRKFLQLHSQIFLLSS

SEQ ID NO: 31981 - protein, 39 aa, Artificial Sequence
  Quasi-synthetic sequence derived from human genome
VLIIAKMRMVALKAGWQQRKRSERKITLMVMMVVMVFVI

SEQ ID NO: 31982 - protein, 39 aa, Artificial Sequence
  Quasi-synthetic sequence derived from human genome
YSLMIRRLRGVRLLSGSREKDRNLRRITRLVLVVVAVFV

SEQ ID NO: 31983 - protein, 39 aa, Artificial Sequence
  Quasi-synthetic sequence derived from human genome
YQTRVIHDGARLFRIKCVTRIQAYWRGCVVRKWYRNLRK

SEQ ID NO: 31984 - protein, 39 aa, Artificial Sequence
  Quasi-synthetic sequence derived from human genome
RKHFRLVLRLVLRGGRELGTFHSRLIKVISKPSQKKQSL

SEQ ID NO: 31985 - protein, 39 aa, Artificial Sequence
  Quasi-synthetic sequence derived from human genome
RRRQGWLKEIRKLQKSTHLLIRKLPFSRLAAEAFLVHLF

SEQ ID NO: 31986 - protein, 39 aa, Artificial Sequence
  Quasi-synthetic sequence derived from human genome
VLLLLLLGLLRPLRRRSCLLAPGKGPPALGASRGPRRSW

SEQ ID NO: 31987 - protein, 39 aa, Artificial Sequence
  Quasi-synthetic sequence derived from human genome
LFIFTFLYVQMRKTLRFREQRYSLFKLVFAIMVVFLLMW

SEQ ID NO: 31988 - protein, 39 aa, Artificial Sequence
  Quasi-synthetic sequence derived from human genome
FVFFRKLTTIFPLNWKYRKALSLGCQRVTLHKNMFLTYI

SEQ ID NO: 31989 - protein, 39 aa, Artificial Sequence
  Quasi-synthetic sequence derived from human genome
LRRGRPKRRRKPQPHSGSVLALPLRSRKIRKQLRSVVSR

SEQ ID NO: 31990 - protein, 39 aa, Artificial Sequence
  Quasi-synthetic sequence derived from human genome
LVKRARLVRVHAYIISYLKKEMPSVFGKENKKKQLILKL

SEQ ID NO: 31991 - protein, 39 aa, Artificial Sequence
  Quasi-synthetic sequence derived from human genome
TIRKSGFGGITMLFTGYFVLCCSWSFRRLKKLCRPLPWK

SEQ ID NO: 31992 - protein, 39 aa, Artificial Sequence
  Quasi-synthetic sequence derived from human genome
KRVPSIYKLKLRPRIRPRRDHRPEKQPSRIPRPLAYVFL

SEQ ID NO: 31993 - protein, 39 aa, Artificial Sequence
  Quasi-synthetic sequence derived from human genome
HLLPALGFKNKTVLKKRCKDCYLVKRRGRWYVYCKTHPR

SEQ ID NO: 31994 - protein, 39 aa, Artificial Sequence
  Quasi-synthetic sequence derived from human genome
LQVHVLCLTLGYFIFDLGCIWRFAWRKSIKKYHAWRSRR

SEQ ID NO: 31995 - protein, 39 aa, Artificial Sequence
  Quasi-synthetic sequence derived from human genome
RLLRAPLGLLRLDPSGGALLLCGLVALLGWSWLRRRRAR

SEQ ID NO: 31996 - protein, 39 aa, Artificial Sequence
  Quasi-synthetic sequence derived from human genome
RIARFRFRAFHFLNRFPSVYLRCKMVVCRAYDPSSRCYR

SEQ ID NO: 31997 - protein, 39 aa, Artificial Sequence
  Quasi-synthetic sequence derived from human genome
YKSRFLCGKEIKKKKCIFRLRIRVPPNPPGKLLPDKGLL

SEQ ID NO: 31998 - protein, 39 aa, Artificial Sequence
  Quasi-synthetic sequence derived from human genome
WVYLLLRKILLRKFCQMRKRRLREQAPLLPTPTVIDPSR

SEQ ID NO: 31999 - protein, 39 aa, Artificial Sequence
  Quasi-synthetic sequence derived from human genome
LLMFIIILLGVMLTIKRRRNAYSYSYYLSQRKLAKKQKE

SEQ ID NO: 32000 - protein, 39 aa, Artificial Sequence
  Quasi-synthetic sequence derived from human genome
LHNMMKKLFLQLIAEFKRLGSSVIYANFNRIILCTKKRR

SEQ ID NO: 32001 - protein, 40 aa, Artificial Sequence
  Quasi-synthetic sequence derived from human genome
LLIFLLLVILAMGLWVIRVQKRHKMPRMKKLMRNRMKLRK

SEQ ID NO: 32002 - protein, 40 aa, Artificial Sequence
  Quasi-synthetic sequence derived from human genome
PPKRKKKKKFCYLCILLLIVLFILLCCLYRLCKKSKPIKK

SEQ ID NO: 32003 - protein, 40 aa, Artificial Sequence
  Quasi-synthetic sequence derived from human genome
RARLIPIIVLLLQKAWRGTLARWRCRRLRAIYTIMRWFRR

SEQ ID NO: 32004 - protein, 40 aa, Artificial Sequence
  Quasi-synthetic sequence derived from human genome
GLLIFLLLVILAMGLWVIRVQKRHKMPRMKKLMRNRMKLR

SEQ ID NO: 32005 - protein, 40 aa, Artificial Sequence
  Quasi-synthetic sequence derived from human genome
RSTWLRVRKARPQLILSRRPRRRLGSLRWCGRRRLRWRLL

SEQ ID NO: 32006 - protein, 40 aa, Artificial Sequence
  Quasi-synthetic sequence derived from human genome
LLRNIPRWTHLLRLLRLIILLRIFHLFHQKRQLEKLIRRR

SEQ ID NO: 32007 - protein, 40 aa, Artificial Sequence
  Quasi-synthetic sequence derived from human genome
FRIYAVSTLLLFLLFFLFRLLLRFLRLCRSFYITCRRLRC

SEQ ID NO: 32008 - protein, 40 aa, Artificial Sequence
  Quasi-synthetic sequence derived from human genome
KLLRNIPRWTHLVRLLRLIILIRIFHLLHQKRQLEKLMRR

SEQ ID NO: 32009 - protein, 40 aa, Artificial Sequence
  Quasi-synthetic sequence derived from human genome
HRIAGVKRFLKHAGKWSLRWFLSPRWILQFRRWARKWSRF

SEQ ID NO: 32010 - protein, 40 aa, Artificial Sequence
  Quasi-synthetic sequence derived from human genome
VRMPFRRKIYYLPRRYKFMSRIDKQISRFRRWLPKKPMRL

SEQ ID NO: 32011 - protein, 40 aa, Artificial Sequence
  Quasi-synthetic sequence derived from human genome
KYWRMYVVRRRYKIRRAATIVLQSYLRGFLARNRYRKILR

SEQ ID NO: 32012 - protein, 40 aa, Artificial Sequence
  Quasi-synthetic sequence derived from human genome
FLARKQYRKVLYCVVIIQKNYRAFLLRRRFLHLKKAAIVF

SEQ ID NO: 32013 - protein, 40 aa, Artificial Sequence
  Quasi-synthetic sequence derived from human genome
RLLKRLLGPKLRRFLKPQGHPRLLLWFKRGLALAAFLGLV

SEQ ID NO: 32014 - protein, 40 aa, Artificial Sequence
  Quasi-synthetic sequence derived from human genome
LAVINFLAKQRLRKRVNAALVIQKYWRRVLAQRKLLMLKK

SEQ ID NO: 32015 - protein, 40 aa, Artificial Sequence
  Quasi-synthetic sequence derived from human genome
ISKSKLSRRWRRWNRFNRRRCRAAVKSVTFYWLVIVLVFL

SEQ ID NO: 32016 - protein, 40 aa, Artificial Sequence
  Quasi-synthetic sequence derived from human genome
KKKKRYLRASSNRNFLLTMRPFLKRAILVLSYVLVILYFR

SEQ ID NO: 32017 - protein, 40 aa, Artificial Sequence
  Quasi-synthetic sequence derived from human genome
ARKKSGILLLTLVSFLIFILFIIVQLFIMKLRKAHVIWKK

SEQ ID NO: 32018 - protein, 40 aa, Artificial Sequence
  Quasi-synthetic sequence derived from human genome
LKMMHIAATLIQRRFRTLMMRRRFLSLKKTAILIQRKYRA

SEQ ID NO: 32019 - protein, 40 aa, Artificial Sequence
  Quasi-synthetic sequence derived from human genome
VLKIRRRKMNHHKYRKLVKKTRFLRRKVQEGRLRRKQIKF

SEQ ID NO: 32020 - protein, 40 aa, Artificial Sequence
  Quasi-synthetic sequence derived from human genome
RKKRSRIPLLRKRRFQLGRSMNPRARKNRSRIPLLRKRRF

SEQ ID NO: 32021 - protein, 40 aa, Artificial Sequence
  Quasi-synthetic sequence derived from human genome
ARLCLRLLLLLGYRRRCPPLLRGLVQRWRYGKVCLRSLLY

SEQ ID NO: 32022 - protein, 40 aa, Artificial Sequence
  Quasi-synthetic sequence derived from human genome
FFIKRRFRSLRHKIILLQSRARGYLARQRYQQMRRSLVKF

SEQ ID NO: 32023 - protein, 40 aa, Artificial Sequence
  Quasi-synthetic sequence derived from human genome
KAKRCNRRLKSQILLKKYLMKRRWKKNFIAVSAANRFKKI

SEQ ID NO: 32024 - protein, 40 aa, Artificial Sequence
  Quasi-synthetic sequence derived from human genome
RFLRLHCGLWVRRKAGYKKKLWKKTPARKKRLREFVFCNK

SEQ ID NO: 32025 - protein, 40 aa, Artificial Sequence
  Quasi-synthetic sequence derived from human genome
LLVHSLNLLAKQGLRLLRGLRRRNVQKKVALAKKLLAKLR

SEQ ID NO: 32026 - protein, 40 aa, Artificial Sequence
  Quasi-synthetic sequence derived from human genome
RSKQLRRQMWWRGCKIKAIMALVAAILLLVIIILIVMKYR

SEQ ID NO: 32027 - protein, 40 aa, Artificial Sequence
  Quasi-synthetic sequence derived from human genome
KRKKRIKRRALLFLSYILTHFIFLALLLILIVLLRHTDCF

SEQ ID NO: 32028 - protein, 40 aa, Artificial Sequence
  Quasi-synthetic sequence derived from human genome
RRLLLALHRRLRGLRRAAAGTSRLLFQRLLPCGVIKFRYI

SEQ ID NO: 32029 - protein, 40 aa, Artificial Sequence
  Quasi-synthetic sequence derived from human genome
LMNNRTGRRKSWRLEFLFLRRRCFLLTFYLWFLFFSRFLL

SEQ ID NO: 32030 - protein, 40 aa, Artificial Sequence
  Quasi-synthetic sequence derived from human genome
ALRRKKKKTIKMLMLVVVLFALCWFPLNCYVLLLSSKVIR

SEQ ID NO: 32031 - protein, 40 aa, Artificial Sequence
  Quasi-synthetic sequence derived from human genome
RSRIPLLRKRRFQLGRSMNLRARKNRSQIVLFQKRRFQFF

SEQ ID NO: 32032 - protein, 40 aa, Artificial Sequence
  Quasi-synthetic sequence derived from human genome
LKVLFKKTHRILRRLFNLCKRCHRQPRFRLPKERSLSYWW

SEQ ID NO: 32033 - protein, 40 aa, Artificial Sequence
  Quasi-synthetic sequence derived from human genome
RGVLVRRTLLVAALRAWMIQCWWRTLVQRRIRQRRQALLR

SEQ ID NO: 32034 - protein, 40 aa, Artificial Sequence
  Quasi-synthetic sequence derived from human genome
LLVRRRFISLKKATIFVQRKYRATICAKHKLYQFLHLRKA

SEQ ID NO: 32035 - protein, 40 aa, Artificial Sequence
  Quasi-synthetic sequence derived from human genome
IMKTRVCRRLRRANRVLRARCRRAVKSNACYWAVLLLVFL

SEQ ID NO: 32036 - protein, 40 aa, Artificial Sequence
  Quasi-synthetic sequence derived from human genome
IYFANIGFFRRKLIDAVGFSPLRILRKRNKALRKIRKLQK

SEQ ID NO: 32037 - protein, 40 aa, Artificial Sequence
  Quasi-synthetic sequence derived from human genome
RSRIPLLRKRRFQLYRSTNPRARKNRSRIPLLRKRRFQLY

SEQ ID NO: 32038 - protein, 40 aa, Artificial Sequence
  Quasi-synthetic sequence derived from human genome
FLGHRLLKRLLGPKLRRFLKPQGHPRLLLWFKRDPRPWSK

SEQ ID NO: 32039 - protein, 40 aa, Artificial Sequence
  Quasi-synthetic sequence derived from human genome
MRKLFIQRAKKIDKISRIGFPMAFLIFNMFYWIIYKIVRR

SEQ ID NO: 32040 - protein, 40 aa, Artificial Sequence
  Quasi-synthetic sequence derived from human genome
RSRIPLLRKRRFQLYRSMNSRARKNRSQIVLFQKRRFHFF

SEQ ID NO: 32041 - protein, 40 aa, Artificial Sequence
  Quasi-synthetic sequence derived from human genome
LKTYLKRFKVMKPKVLRSWCRQILKGLLFLHTRTPPIIHR

SEQ ID NO: 32042 - protein, 40 aa, Artificial Sequence
  Quasi-synthetic sequence derived from human genome
GMKRALGRRKGVWLRLRKILFCVLGLYIAIPFLIKLCPGI

SEQ ID NO: 32043 - protein, 40 aa, Artificial Sequence
  Quasi-synthetic sequence derived from human genome
MRRLRRLAHLVLFCPFSKRLQGRLPGLRVRCIFLAWLGVF

SEQ ID NO: 32044 - protein, 40 aa, Artificial Sequence
  Quasi-synthetic sequence derived from human genome
LKKKRRNFAELKIKRLRKKFAQKMLRKARRKLIYEKAKHY

SEQ ID NO: 32045 - protein, 40 aa, Artificial Sequence
  Quasi-synthetic sequence derived from human genome
KKIIQKHFEKKKDIRRGIGYLKLICFLIPFLLSLKKKMKV

SEQ ID NO: 32046 - protein, 40 aa, Artificial Sequence
  Quasi-synthetic sequence derived from human genome
IQKYFFSPTLFRVIRLARIGRILRLIRGAKGIRTLLFALM

SEQ ID NO: 32047 - protein, 40 aa, Artificial Sequence
  Quasi-synthetic sequence derived from human genome
RSRIPLLRKRWFQLGHSMNPRARKNRSRIPLLRKRRFQLY

SEQ ID NO: 32048 - protein, 40 aa, Artificial Sequence
  Quasi-synthetic sequence derived from human genome
LVRLLRLIILIRIFHLLHQKRQLEKLMRRLVSENKRRYTR

SEQ ID NO: 32049 - protein, 40 aa, Artificial Sequence
  Quasi-synthetic sequence derived from human genome
MRRIRYEFKAKNIKKKKVSIMVSVDGVKVILKKKKKLLLL

SEQ ID NO: 32050 - protein, 40 aa, Artificial Sequence
  Quasi-synthetic sequence derived from human genome
RSHIPLVRKRRFQLRRCMNPRARKNRSQIVLFQKRRFHFF

SEQ ID NO: 32051 - protein, 40 aa, Artificial Sequence
  Quasi-synthetic sequence derived from human genome
KLLKKRSKQPLGEVKRRLSLYLTKIHFWLPVLKMIRKKQM

SEQ ID NO: 32052 - protein, 40 aa, Artificial Sequence
  Quasi-synthetic sequence derived from human genome
RRRNTPFHERFFRFLLRKLYVFRRSFLMTCISLRNLILGR

SEQ ID NO: 32053 - protein, 40 aa, Artificial Sequence
  Quasi-synthetic sequence derived from human genome
LSRILKSPEIQRALRAPRKKIHRRVLKKNPLKNLRIMLKL

SEQ ID NO: 32054 - protein, 40 aa, Artificial Sequence
  Quasi-synthetic sequence derived from human genome
KIFKCYFKHTLQQKVFILFLTLWLLSLLKLLNVRRLFPQK

SEQ ID NO: 32055 - protein, 40 aa, Artificial Sequence
  Quasi-synthetic sequence derived from human genome
KCYKARKFFLFYRQQKWASGVIAIAWLLYCHKTRLKKILK

SEQ ID NO: 32056 - protein, 40 aa, Artificial Sequence
  Quasi-synthetic sequence derived from human genome
LFRVIRLARIGRILRLIRAAKGIRTLLFALMMSLPALFNI

SEQ ID NO: 32057 - protein, 40 aa, Artificial Sequence
  Quasi-synthetic sequence derived from human genome
RLRRVIAAFYFPKREKKRILFLYNDLLKKRAAFTKLRRAA

SEQ ID NO: 32058 - protein, 40 aa, Artificial Sequence
  Quasi-synthetic sequence derived from human genome
RRRGRPSRRFLGKKYRKYYYKSPKPLLRPFLCRICGSRFL

SEQ ID NO: 32059 - protein, 40 aa, Artificial Sequence
  Quasi-synthetic sequence derived from human genome
LIYPCSSREFKRAFLRLLRCQCRRRRRRRPLWRVYGHHWR

SEQ ID NO: 32060 - protein, 40 aa, Artificial Sequence
  Quasi-synthetic sequence derived from human genome
LKHLCRLKIRKCMGRLHLRCPVFMSFLPLPNRLKAYVLYK

SEQ ID NO: 32061 - protein, 40 aa, Artificial Sequence
  Quasi-synthetic sequence derived from human genome
FKERLKLFFIKNQRSSLRIRLFNFSLKLLSCLLYIIRVLL

SEQ ID NO: 32062 - protein, 40 aa, Artificial Sequence
  Quasi-synthetic sequence derived from human genome
KYFFSPTLFRVIRLARIGRILRLIRGAKGIRTLLFALMMS

SEQ ID NO: 32063 - protein, 40 aa, Artificial Sequence
  Quasi-synthetic sequence derived from human genome
RAFLLRRRFLHLKKAAIVFQKQLRGQIARRVYRQLLAEKR

SEQ ID NO: 32064 - protein, 40 aa, Artificial Sequence
  Quasi-synthetic sequence derived from human genome
KLGVLLRRVTRNLVRNKLAVITRLLQNLIMGLFLLFFVLR

SEQ ID NO: 32065 - protein, 40 aa, Artificial Sequence
  Quasi-synthetic sequence derived from human genome
RRIKLSPLMMYEKLSMIRFRYRILRSQHFRTKSKVCKLRK

SEQ ID NO: 32066 - protein, 40 aa, Artificial Sequence
  Quasi-synthetic sequence derived from human genome
FLVQKKPLIFLGCCFFSTLVLLLSIAIFQRQKRRKFWKAK

SEQ ID NO: 32067 - protein, 40 aa, Artificial Sequence
  Quasi-synthetic sequence derived from human genome
RLARAYRRSQRASFKRARRPGARALRLVLGIVLLFWACFL

SEQ ID NO: 32068 - protein, 40 aa, Artificial Sequence
  Quasi-synthetic sequence derived from human genome
KYRRRPALGWLARLLRSRAGSRKRPLTLLQRAGLLLLLGL

SEQ ID NO: 32069 - protein, 40 aa, Artificial Sequence
  Quasi-synthetic sequence derived from human genome
WWRGMLVRRTLLHAALRAWIIQCWWRQVLEKLLAKRRRMV

SEQ ID NO: 32070 - protein, 40 aa, Artificial Sequence
  Quasi-synthetic sequence derived from human genome
MSLKLTCSAFRLQRALRFLLGRLPWRVASGARRFRRWLNR

SEQ ID NO: 32071 - protein, 40 aa, Artificial Sequence
  Quasi-synthetic sequence derived from human genome
RLGLLGRRGFSGRLGGYWKTWIFWKTWIFWKTWIFRKTYI

SEQ ID NO: 32072 - protein, 40 aa, Artificial Sequence
  Quasi-synthetic sequence derived from human genome
FKERLKLFFIKNQRSSLRIRLFNFSLKLLTCLLYIVRVLL

SEQ ID NO: 32073 - protein, 40 aa, Artificial Sequence
  Quasi-synthetic sequence derived from human genome
FFSILTVRSALFALRYNILTLMRMLSLKSLKKQMKKVKKM

SEQ ID NO: 32074 - protein, 40 aa, Artificial Sequence
  Quasi-synthetic sequence derived from human genome
LFRVIRLARIGRILRLIKGAKGIRTLLFALMMSLPALFNI

SEQ ID NO: 32075 - protein, 40 aa, Artificial Sequence
  Quasi-synthetic sequence derived from human genome
VFKSAPILKRALKVKQAMLQLYVLKLLKLQTKYLGRQWRK

SEQ ID NO: 32076 - protein, 40 aa, Artificial Sequence
  Quasi-synthetic sequence derived from human genome
VLILFMFRRLRQFRQAQPTPQYRFRKRDKVMFYGRKIMRK

SEQ ID NO: 32077 - protein, 40 aa, Artificial Sequence
  Quasi-synthetic sequence derived from human genome
RIPLLRKRRFQLYRSTNPRARKNRSRIPLLRKHRFQLYRS

SEQ ID NO: 32078 - protein, 40 aa, Artificial Sequence
  Quasi-synthetic sequence derived from human genome
IRLKNIRKVYGRCMWYRLRLLKPQPNIIPTVKKIVLLAGW

SEQ ID NO: 32079 - protein, 40 aa, Artificial Sequence
  Quasi-synthetic sequence derived from human genome
PLVYALASRHFRARFRRLWPCGRRRRHRARRALRRVRPAS

SEQ ID NO: 32080 - protein, 40 aa, Artificial Sequence
  Quasi-synthetic sequence derived from human genome
LLRRLRAVRLRSGAKALGKARRKVTVLVLVVLAVCLLCWT

SEQ ID NO: 32081 - protein, 40 aa, Artificial Sequence
  Quasi-synthetic sequence derived from human genome
LFRIVRLARIGRILRLVRAARGIRTLLFALMMSLPSLFNI

SEQ ID NO: 32082 - protein, 40 aa, Artificial Sequence
  Quasi-synthetic sequence derived from human genome
KLVSPKWKNFKGLKLLCRDKIRLNNAIWRAWYIQYVKRRK

SEQ ID NO: 32083 - protein, 40 aa, Artificial Sequence
  Quasi-synthetic sequence derived from human genome
RKYKKNIKALYIVHPTMFIKTLLILFKPLISFKFGQKIFY

SEQ ID NO: 32084 - protein, 40 aa, Artificial Sequence
  Quasi-synthetic sequence derived from human genome
GWRILKVLLWLLAILTGLIAGKFLFHQRLFGQLLRLKMFR

SEQ ID NO: 32085 - protein, 40 aa, Artificial Sequence
  Quasi-synthetic sequence derived from human genome
KFLRVKRSAICIQSWWRGTLGRRKAAKRKWAAQTIRRLIR

SEQ ID NO: 32086 - protein, 40 aa, Artificial Sequence
  Quasi-synthetic sequence derived from human genome
ALFVYLNRKIVQVMRKQKTINRFLMRKRLLFPALVTLLIS

SEQ ID NO: 32087 - protein, 40 aa, Artificial Sequence
  Quasi-synthetic sequence derived from human genome
LFRVIRLARIGRVLRLIRGAKGIRTLLFALMMSLPALFNI

SEQ ID NO: 32088 - protein, 40 aa, Artificial Sequence
  Quasi-synthetic sequence derived from human genome
FRLTRWRTRYKTIRINLGLWAASFILALPVWVYSKVIKFK

SEQ ID NO: 32089 - protein, 40 aa, Artificial Sequence
  Quasi-synthetic sequence derived from human genome
KPKLSKFILISSLAILLMVSLLLLSLWKLWRVKKFLIPSV

SEQ ID NO: 32090 - protein, 40 aa, Artificial Sequence
  Quasi-synthetic sequence derived from human genome
LFRVIRLARIGRILRLVKGAKGIRTLLFALMMSLPALFNI

SEQ ID NO: 32091 - protein, 40 aa, Artificial Sequence
  Quasi-synthetic sequence derived from human genome
LLRICRVLRSLKLLAQFRQIQIIILVLVRALKSMTFLLML

SEQ ID NO: 32092 - protein, 40 aa, Artificial Sequence
  Quasi-synthetic sequence derived from human genome
RKNRSRIPLLRKPWFQLGHSMNPRARKNRSRIPLLRKRRF

SEQ ID NO: 32093 - protein, 40 aa, Artificial Sequence
  Quasi-synthetic sequence derived from human genome
KFFLLKRFNKEKLGLLLLTFLGIVAAVLVKKYQAVLRRKA

SEQ ID NO: 32094 - protein, 40 aa, Artificial Sequence
  Quasi-synthetic sequence derived from human genome
RSRIPLLRKHRFQLYRSMNSRARKNRSQIVLFQKRRFHFF

SEQ ID NO: 32095 - protein, 40 aa, Artificial Sequence
  Quasi-synthetic sequence derived from human genome
LVTLLIWVPVKVILHKKRYIYRKIKGWRPVLMMCVVLTTL

SEQ ID NO: 32096 - protein, 40 aa, Artificial Sequence
  Quasi-synthetic sequence derived from human genome
LKRLVKLHIKRHYHKKFWKLGAVIFFFIIVLVLMQREVSV

SEQ ID NO: 32097 - protein, 40 aa, Artificial Sequence
  Quasi-synthetic sequence derived from human genome
KKIRKQMKLLLLLLLLSCAAWLTYVHLGLVRQGRALRQRL

SEQ ID NO: 32098 - protein, 40 aa, Artificial Sequence
  Quasi-synthetic sequence derived from human genome
PILMTILINFLIFIRILGILLSKLRTRQMRCRDYRLRLAR

SEQ ID NO: 32099 - protein, 40 aa, Artificial Sequence
  Quasi-synthetic sequence derived from human genome
IRNIGIWFFWIRLYKIRRGRTRPQALLFLCMILLLIVLHT

SEQ ID NO: 32100 - protein, 40 aa, Artificial Sequence
  Quasi-synthetic sequence derived from human genome
RARPGAWRRDIFGRIIWHKFKQWVIPWHLNKRYNRKRFFA

SEQ ID NO: 32101 - protein, 40 aa, Artificial Sequence
  Quasi-synthetic sequence derived from human genome
KWKHSRTMMLVVFKSAPILKRALKVKQAMMQLYVLKLLKV

SEQ ID NO: 32102 - protein, 40 aa, Artificial Sequence
  Quasi-synthetic sequence derived from human genome
RYVRGYQARCYAKFLRRTKAATIIQKYWRMYVVRRRYKIR

SEQ ID NO: 32103 - protein, 40 aa, Artificial Sequence
  Quasi-synthetic sequence derived from human genome
FLFFFVLFLCLFFYNCYKGYLPRQCLKFRSALLIGKKKPK

SEQ ID NO: 32104 - protein, 40 aa, Artificial Sequence
  Quasi-synthetic sequence derived from human genome
IQAWWRGTLVRRALLHAALSACIIQCWWRLILSKILKKRR

SEQ ID NO: 32105 - protein, 40 aa, Artificial Sequence
  Quasi-synthetic sequence derived from human genome
YLVRKQMRLQRKAVISLQSYFRMRKARQYYLKMYKAIIVI

SEQ ID NO: 32106 - protein, 40 aa, Artificial Sequence
  Quasi-synthetic sequence derived from human genome
VRQIQLLLWKNWTLRKRQKIRFVVELVWPLSLFLVLIWLR

SEQ ID NO: 32107 - protein, 40 aa, Artificial Sequence
  Quasi-synthetic sequence derived from human genome
FKLLILLIGTWALFFRKRRADMPRVFVFRALLLVLIFLFV

SEQ ID NO: 32108 - protein, 40 aa, Artificial Sequence
  Quasi-synthetic sequence derived from human genome
LVLRGNTKINTFNWAKIRKLSFKRKHFLIKLHANILVLCK

SEQ ID NO: 32109 - protein, 40 aa, Artificial Sequence
  Quasi-synthetic sequence derived from human genome
KLRADKLRAACIRIQKTIRGWLLRKKYLRMRKAAITMQRY

SEQ ID NO: 32110 - protein, 40 aa, Artificial Sequence
  Quasi-synthetic sequence derived from human genome
RTFRVFRALKAISVVSRLKVIVGALLRSVKKLVNVIILTF

SEQ ID NO: 32111 - protein, 40 aa, Artificial Sequence
  Quasi-synthetic sequence derived from human genome
AARVARWRRLRLQQLRRLRGLLRVLRGRPGAGSRRRGRMA

SEQ ID NO: 32112 - protein, 40 aa, Artificial Sequence
  Quasi-synthetic sequence derived from human genome
PLIAAGVIGGLFILVIVGLTFAVYVRRKSIKKKRALRRFL

SEQ ID NO: 32113 - protein, 40 aa, Artificial Sequence
  Quasi-synthetic sequence derived from human genome
QKTRRWRGLGSLFRRACCVALPLQLLLLLFLLLLFLLPIR

SEQ ID NO: 32114 - protein, 40 aa, Artificial Sequence
  Quasi-synthetic sequence derived from human genome
LKTYLKRFKVMKPKVLRSWCRQILKGLQFLHTRTPPIIHR

SEQ ID NO: 32115 - protein, 40 aa, Artificial Sequence
  Quasi-synthetic sequence derived from human genome
FLARRRYRKMLEEHKAVILQKYARAWLARRRFQSIRRFVL

SEQ ID NO: 32116 - protein, 40 aa, Artificial Sequence
  Quasi-synthetic sequence derived from human genome
VANHFSRLKIHFTKVFSAFALVRTIRYLYRRLQRMLGLRR

SEQ ID NO: 32117 - protein, 40 aa, Artificial Sequence
  Quasi-synthetic sequence derived from human genome
LWRRQIYAVATLRFLKLRRERRALLCLLLVLGIAFIPIIL

SEQ ID NO: 32118 - protein, 40 aa, Artificial Sequence
  Quasi-synthetic sequence derived from human genome
WSLRRRPARTLGLLLLVVLGFLVLRRLDWSTLVPLRLRHR

SEQ ID NO: 32119 - protein, 40 aa, Artificial Sequence
  Quasi-synthetic sequence derived from human genome
IKNYIINKDILRRVLVLMASKHAFLALCALRFKRKIIGLK

SEQ ID NO: 32120 - protein, 40 aa, Artificial Sequence
  Quasi-synthetic sequence derived from human genome
SRYPLLLPKGVVLKLKPVATRFPRKAWRQKRSSVLKPLLI

SEQ ID NO: 32121 - protein, 40 aa, Artificial Sequence
  Quasi-synthetic sequence derived from human genome
AFVVYSSIVSFYVPFIVTLLVYIKIYIVLRRRRKRVNTKR

SEQ ID NO: 32122 - protein, 40 aa, Artificial Sequence
  Quasi-synthetic sequence derived from human genome
LILLVVRRLRVPKTPAPDGPRYRFRKRDKVLFYGRKIMRK

SEQ ID NO: 32123 - protein, 40 aa, Artificial Sequence
  Quasi-synthetic sequence derived from human genome
LEILRGKMMQRRPRSAEVKYFYFFKILLRLRLAILKYLFI

SEQ ID NO: 32124 - protein, 40 aa, Artificial Sequence
  Quasi-synthetic sequence derived from human genome
VRVILAPWKKGLIAVVIIGVIIALLIIAAKCYFLRKAKAK

SEQ ID NO: 32125 - protein, 40 aa, Artificial Sequence
  Quasi-synthetic sequence derived from human genome
MRILRRLLRRYRESKKIDRHMYHSLYLKVKGNVFKNKRIL

SEQ ID NO: 32126 - protein, 40 aa, Artificial Sequence
  Quasi-synthetic sequence derived from human genome
KLRHSVIYIQAIFRGKKARRHLKMMHIAATLIQRRFRTLM

SEQ ID NO: 32127 - protein, 40 aa, Artificial Sequence
  Quasi-synthetic sequence derived from human genome
KWLKVYKSIYFLGHIFFLSLLFILPYIHKAMVPRKEKLKK

SEQ ID NO: 32128 - protein, 40 aa, Artificial Sequence
  Quasi-synthetic sequence derived from human genome
RSRKLHQQYRLARQRIIQFQARCRAYLVRKAFRHRLWAVL

SEQ ID NO: 32129 - protein, 40 aa, Artificial Sequence
  Quasi-synthetic sequence derived from human genome
KAKQRLKRLRNIHYLFNTALFLIAWRLLIARSQMARNVWF

SEQ ID NO: 32130 - protein, 40 aa, Artificial Sequence
  Quasi-synthetic sequence derived from human genome
RRRGFGLFFFLRLHRLLLLFLVLRGTLANKLNVPQVLLPF

SEQ ID NO: 32131 - protein, 40 aa, Artificial Sequence
  Quasi-synthetic sequence derived from human genome
KLFMRMASKQLRENVLVKRKRTKGKKLLLSIGVLLHKWKN

SEQ ID NO: 32132 - protein, 40 aa, Artificial Sequence
  Quasi-synthetic sequence derived from human genome
KYLKVFYKFINLNRYKIRHTRKKPFKCKNCVKSFCMFSHK

SEQ ID NO: 32133 - protein, 40 aa, Artificial Sequence
  Quasi-synthetic sequence derived from human genome
CLILIVIFMITKFVQDRHRARRNRLRKDQLKKLPVHKFKK

SEQ ID NO: 32134 - protein, 40 aa, Artificial Sequence
  Quasi-synthetic sequence derived from human genome
YWRRYSTRQRFLKLKYYSIILQSRIRMIIAVTSYKRYLWA

SEQ ID NO: 32135 - protein, 40 aa, Artificial Sequence
  Quasi-synthetic sequence derived from human genome
LWFAAWLKVFYCLRIANFNHPLFFLMKRKIIVLMPWLLRL

SEQ ID NO: 32136 - protein, 40 aa, Artificial Sequence
  Quasi-synthetic sequence derived from human genome
KAARDVLGFLRVVRFVRILRIFKLTRHFVGLRVLGHTLRA

SEQ ID NO: 32137 - protein, 40 aa, Artificial Sequence
  Quasi-synthetic sequence derived from human genome
LAAQLALLGLGLLHALLLVLLLCRLRRLRARARARAAARL

SEQ ID NO: 32138 - protein, 40 aa, Artificial Sequence
  Quasi-synthetic sequence derived from human genome
KIWWIIRGPMMLCVTVNFFIFLKILKLLISKLKAHQMCFR

SEQ ID NO: 32139 - protein, 40 aa, Artificial Sequence
  Quasi-synthetic sequence derived from human genome
FLLLVPLLVLALASYRRLCLRLRLADCLVPYSRALYRRRR

SEQ ID NO: 32140 - protein, 40 aa, Artificial Sequence
  Quasi-synthetic sequence derived from human genome
RRVLKKNPLKNLRIMLKLNPYAKTMRRNTILRQARNHKLR

SEQ ID NO: 32141 - protein, 40 aa, Artificial Sequence
  Quasi-synthetic sequence derived from human genome
LKPFLLGCPRFVVIDNCIALKKVASRLKKKRKKKNIKTKV

SEQ ID NO: 32142 - protein, 40 aa, Artificial Sequence
  Quasi-synthetic sequence derived from human genome
MPTPLLPLLLRLLLSCLLLPAARLARQYLLPLLRRLARRL

SEQ ID NO: 32143 - protein, 40 aa, Artificial Sequence
  Quasi-synthetic sequence derived from human genome
KLLERAGLVLRLLRALRVLYVMRLARHSLGLRSLGLTMRR

SEQ ID NO: 32144 - protein, 40 aa, Artificial Sequence
  Quasi-synthetic sequence derived from human genome
LKLPVRSLTYFSARKGKRKTVKAVIDRFLRLHCGLWVRRK

SEQ ID NO: 32145 - protein, 40 aa, Artificial Sequence
  Quasi-synthetic sequence derived from human genome
LKKKLFKRRRVLNRERRLRHRVVGAVIDQGLITRHHLKKR

SEQ ID NO: 32146 - protein, 40 aa, Artificial Sequence
  Quasi-synthetic sequence derived from human genome
RIIRFLPLFKIIVPILIRIADVQIKKRLSLMYSITKGYIK

SEQ ID NO: 32147 - protein, 40 aa, Artificial Sequence
  Quasi-synthetic sequence derived from human genome
RYWRRWNRFCRRKCRAAVKSNVFYWLVIFLVFLNTLTIAS

SEQ ID NO: 32148 - protein, 40 aa, Artificial Sequence
  Quasi-synthetic sequence derived from human genome
HKRMKVKKLPMILALHLKRFKYMDQLHRYTKLSYRVVFPL

SEQ ID NO: 32149 - protein, 40 aa, Artificial Sequence
  Quasi-synthetic sequence derived from human genome
CLKLLLPGLLLLLVVIILILAFWVLPKYKTRKAMRNNVPR

SEQ ID NO: 32150 - protein, 40 aa, Artificial Sequence
  Quasi-synthetic sequence derived from human genome
KAAKDVLGFLRVVRFVRILRIFKLTRHFVGLRVLGHTLRA

SEQ ID NO: 32151 - protein, 40 aa, Artificial Sequence
  Quasi-synthetic sequence derived from human genome
FLAFKNDISFWKKKKSMIGMSTKLWKVKKALKMTIFWRGL

SEQ ID NO: 32152 - protein, 40 aa, Artificial Sequence
  Quasi-synthetic sequence derived from human genome
NIFHFLYGKNRSRIPLLRKRWFQLGRSMNPRARKKRSRIP

SEQ ID NO: 32153 - protein, 40 aa, Artificial Sequence
  Quasi-synthetic sequence derived from human genome
KRVRGWLARTHYKRSMHAIIYLQCCFRRMMAKRELKKLKI

SEQ ID NO: 32154 - protein, 40 aa, Artificial Sequence
  Quasi-synthetic sequence derived from human genome
KLLRFFYSLFFPGLIVCGTLCVCLVIVLWGIRLLLQRKKK

SEQ ID NO: 32155 - protein, 40 aa, Artificial Sequence
  Quasi-synthetic sequence derived from human genome
RWLRIKLWISTVALALVPFLLLIPKFARWFSVPWKVIFVF

SEQ ID NO: 32156 - protein, 40 aa, Artificial Sequence
  Quasi-synthetic sequence derived from human genome
RKYKKNLKALYVVHPTSFIKVLWNILKPLISHKFGKKVIY

SEQ ID NO: 32157 - protein, 40 aa, Artificial Sequence
  Quasi-synthetic sequence derived from human genome
CTRKLTHLRKRIHRPRRRTTRRWKRWFKFRKRKGEKRPRP

SEQ ID NO: 32158 - protein, 40 aa, Artificial Sequence
  Quasi-synthetic sequence derived from human genome
RWQRRLRRAARRQVLSGHLPFCRFRLRYPSLSPSAFWVWK

SEQ ID NO: 32159 - protein, 40 aa, Artificial Sequence
  Quasi-synthetic sequence derived from human genome
QKRMRVKKLPMILALHLKRFKYMEQLHRYTKLSYRVVFPL

SEQ ID NO: 32160 - protein, 40 aa, Artificial Sequence
  Quasi-synthetic sequence derived from human genome
IKTIKSLRVLRVLRPLKTIKRLPKLKAVFDCVVTSLKNVF

SEQ ID NO: 32161 - protein, 40 aa, Artificial Sequence
  Quasi-synthetic sequence derived from human genome
MKHFLRMLIQVCLYFYCKFLWRCLKFVMRKLTGRCELQRI

SEQ ID NO: 32162 - protein, 40 aa, Artificial Sequence
  Quasi-synthetic sequence derived from human genome
LRILHISVMGGMIALLLSILCLVMILYTRRRWCKRRRVPQ

SEQ ID NO: 32163 - protein, 40 aa, Artificial Sequence
  Quasi-synthetic sequence derived from human genome
RLRALVVIPIIFGILFAILLVLVFIKKVAKKPTNKAPHPK

SEQ ID NO: 32164 - protein, 40 aa, Artificial Sequence
  Quasi-synthetic sequence derived from human genome
RRLRKNLKSLIIVHPSWFIRTVLAISRPFISVKFINKIQY

SEQ ID NO: 32165 - protein, 40 aa, Artificial Sequence
  Quasi-synthetic sequence derived from human genome
KLSRALRYYYNKRILHKTKGKRFTYKFNFNKLVLVNYPFI

SEQ ID NO: 32166 - protein, 40 aa, Artificial Sequence
  Quasi-synthetic sequence derived from human genome
RSIAIIVPLVLLVTLITTLVIGLVLCKRKRRTKTIRRQPI

SEQ ID NO: 32167 - protein, 40 aa, Artificial Sequence
  Quasi-synthetic sequence derived from human genome
PWNTIALLCGAFLALFKAAEFAKLSIKWMIKIRKRYLKRR

SEQ ID NO: 32168 - protein, 40 aa, Artificial Sequence
  Quasi-synthetic sequence derived from human genome
KFILWRRFRWAIILFIILFILLLFLAIFIYAFPNYAAMKL

SEQ ID NO: 32169 - protein, 40 aa, Artificial Sequence
  Quasi-synthetic sequence derived from human genome
VRVSYQKLLKYYVLNALKHRPPKAQKKRYLFRSFKATKFF

SEQ ID NO: 32170 - protein, 40 aa, Artificial Sequence
  Quasi-synthetic sequence derived from human genome
RVQRRPWGAWLSARLWKWLKSPRSWRLGLALLLGGALLFW

SEQ ID NO: 32171 - protein, 40 aa, Artificial Sequence
  Quasi-synthetic sequence derived from human genome
LFFRRPKASLPRVFVLRALLMVLVFLLVVSYWLFYGVRIL

SEQ ID NO: 32172 - protein, 40 aa, Artificial Sequence
  Quasi-synthetic sequence derived from human genome
FRIKRFLAKKQKQNRPIPQWIRMKTGNKIRYNSKRRHWRR

SEQ ID NO: 32173 - protein, 40 aa, Artificial Sequence
  Quasi-synthetic sequence derived from human genome
ALFYLGLTMVGKIKRLKKSAFVVLILLITAKLLVLPLLCR

SEQ ID NO: 32174 - protein, 40 aa, Artificial Sequence
  Quasi-synthetic sequence derived from human genome
CWRNLFSCINLLRLLNKLTKWKHSRTMMLVVFKSAPILKR

SEQ ID NO: 32175 - protein, 40 aa, Artificial Sequence
  Quasi-synthetic sequence derived from human genome
IKFSPVAKKLFVVTAVSAISVIFLAHHFKRKRGKKKGKIL

SEQ ID NO: 32176 - protein, 40 aa, Artificial Sequence
  Quasi-synthetic sequence derived from human genome
FVMLAVSFLVAAICYFRRLHLYSGHKLKWWIGYLQRKFKR

SEQ ID NO: 32177 - protein, 40 aa, Artificial Sequence
  Quasi-synthetic sequence derived from human genome
SFWCRFRRAFVTVTHRLLLLCLGVVMVCVVLRYMKYRWTK

SEQ ID NO: 32178 - protein, 40 aa, Artificial Sequence
  Quasi-synthetic sequence derived from human genome
ALLRLLGLRRGLRRLRRLWAGPRVQRGRGRGRGRGWGPSR

SEQ ID NO: 32179 - protein, 40 aa, Artificial Sequence
  Quasi-synthetic sequence derived from human genome
FLKRATLKNLRKQYRNVKKMTAKELVKVLFSFFWMLFVGL

SEQ ID NO: 32180 - protein, 40 aa, Artificial Sequence
  Quasi-synthetic sequence derived from human genome
MRYLRASSNRNFLLTMRPFLKRAILVLSYVLVILYFRLWI

SEQ ID NO: 32181 - protein, 40 aa, Artificial Sequence
  Quasi-synthetic sequence derived from human genome
KQTDRVVKIAGISAGILVFILLLLVVILIVKKSKLAKKRK

SEQ ID NO: 32182 - protein, 40 aa, Artificial Sequence
  Quasi-synthetic sequence derived from human genome
FLRLFRAARLIKLLRQGYTIRILLWTFVQSFKALPYVCLL

SEQ ID NO: 32183 - protein, 40 aa, Artificial Sequence
  Quasi-synthetic sequence derived from human genome
RWKKVQWCSLSVIKLKNKIKYRAEACIKMQKTIRMWLCKR

SEQ ID NO: 32184 - protein, 40 aa, Artificial Sequence
  Quasi-synthetic sequence derived from human genome
PPRPLAHLCRLRVRKAIGKYRIKLLDTLPLPGRLIRYLKY

SEQ ID NO: 32185 - protein, 40 aa, Artificial Sequence
  Quasi-synthetic sequence derived from human genome
RKILLLQSWFRMVLERRHFLQMKRAAVTIQACWRSYRVRR

SEQ ID NO: 32186 - protein, 40 aa, Artificial Sequence
  Quasi-synthetic sequence derived from human genome
RKLQKNLKTGSFLNRLGKLLLHLFMVLCLTLFLNNIIKKI

SEQ ID NO: 32187 - protein, 40 aa, Artificial Sequence
  Quasi-synthetic sequence derived from human genome
RRRRAMRAFRMLLYSKSTSLTFHWKLWGRHRGRRRGLAHP

SEQ ID NO: 32188 - protein, 40 aa, Artificial Sequence
  Quasi-synthetic sequence derived from human genome
FKPSVFRCIALRWVRLLGFAIVYGTIILKLYRVLQLFLSR

SEQ ID NO: 32189 - protein, 40 aa, Artificial Sequence
  Quasi-synthetic sequence derived from human genome
KLRLCFLVMAYGTTIFHPLLYAFTRQKFQKVLKSKMKKRV

SEQ ID NO: 32190 - protein, 40 aa, Artificial Sequence
  Quasi-synthetic sequence derived from human genome
FLKLFRAARLIKLLRQGYTIRILLWTFVQSFKALPYVCLL

SEQ ID NO: 32191 - protein, 40 aa, Artificial Sequence
  Quasi-synthetic sequence derived from human genome
CIPVFRLARRRKKILFYCHFPDLLLTKRDSFLKRLYRAPI

SEQ ID NO: 32192 - protein, 40 aa, Artificial Sequence
  Quasi-synthetic sequence derived from human genome
FWKTWIFRKTYIGWKTWIFSGRCGLTGRPGFGGRRRFFWK

SEQ ID NO: 32193 - protein, 40 aa, Artificial Sequence
  Quasi-synthetic sequence derived from human genome
CCRCRGRKRCIKKFSIQRFPKILVLHLKRFSESRIRTSKL

SEQ ID NO: 32194 - protein, 40 aa, Artificial Sequence
  Quasi-synthetic sequence derived from human genome
FIIILVLCLRLLQSRCPRVLPKKLQNWNFLPLWMRSLKPW

SEQ ID NO: 32195 - protein, 40 aa, Artificial Sequence
  Quasi-synthetic sequence derived from human genome
PSKIKTFLSLVWKRRILFFVVTLVSVFLVWKFTYAHKYLL

SEQ ID NO: 32196 - protein, 40 aa, Artificial Sequence
  Quasi-synthetic sequence derived from human genome
VLLALAAWASRWLRRKLRARRKGGAPVHVRHMYSTRRPLR

SEQ ID NO: 32197 - protein, 40 aa, Artificial Sequence
  Quasi-synthetic sequence derived from human genome
GSPRAARPPLLLRPVKLLRRRFRLLLALAVVSVGLWTLYL

SEQ ID NO: 32198 - protein, 40 aa, Artificial Sequence
  Quasi-synthetic sequence derived from human genome
LRALRLLRIFKITKYWASLRNLVVSLMSSMKSIISLLFLL

SEQ ID NO: 32199 - protein, 40 aa, Artificial Sequence
  Quasi-synthetic sequence derived from human genome
KVRHTKKKTFKCIKCSKSFFMLSCLIRHKRIHIRQNIYKC

SEQ ID NO: 32200 - protein, 40 aa, Artificial Sequence
  Quasi-synthetic sequence derived from human genome
LRRRLKYFFMSPCDKFRAKGRKPCKLMLQVVKILVVTVQL

SEQ ID NO: 32201 - protein, 40 aa, Artificial Sequence
  Quasi-synthetic sequence derived from human genome
KQKLLRHLVPAAALRRKRKALWAHLFSSLRGYLKSLPRVQ

SEQ ID NO: 32202 - protein, 40 aa, Artificial Sequence
  Quasi-synthetic sequence derived from human genome
KILRVLRVLRPLRAINRAKGLKHVVQCVFVAIRTIGNIMI

SEQ ID NO: 32203 - protein, 40 aa, Artificial Sequence
  Quasi-synthetic sequence derived from human genome
AALRPLVKPKIVKKRTKKFIRHQSDRYVKIKRNWRKPRGI

SEQ ID NO: 32204 - protein, 40 aa, Artificial Sequence
  Quasi-synthetic sequence derived from human genome
WRRYRAKKYLCKVKAACKIQAWYRCWRAHKEYLAILKAVK

SEQ ID NO: 32205 - protein, 40 aa, Artificial Sequence
  Quasi-synthetic sequence derived from human genome
WLAIQKLRSKIHKKVDRKASKGRKLRFHVLSKLLSFMAPI

SEQ ID NO: 32206 - protein, 40 aa, Artificial Sequence
  Quasi-synthetic sequence derived from human genome
KILRVLRVLRPLRAINRAKGLKHVVQCVFVAIRTIGNIVI

SEQ ID NO: 32207 - protein, 40 aa, Artificial Sequence
  Quasi-synthetic sequence derived from human genome
KLSRALRYYYNKRILHKTKGKRFTYKFNFSKVVLVNYPLL

SEQ ID NO: 32208 - protein, 40 aa, Artificial Sequence
  Quasi-synthetic sequence derived from human genome
IRRKVSKIQRFHARSLWTNHKRYGYKKHSYRLVKKLKLQK

SEQ ID NO: 32209 - protein, 40 aa, Artificial Sequence
  Quasi-synthetic sequence derived from human genome
RWLLRTKRLHWSRLLFLLGMLIIGSTYQHLRRPRGLSSLW

SEQ ID NO: 32210 - protein, 40 aa, Artificial Sequence
  Quasi-synthetic sequence derived from human genome
VCRRLRRANRVLRARCRRAVKSNACYWAVLLLVFLNTLTI

SEQ ID NO: 32211 - protein, 40 aa, Artificial Sequence
  Quasi-synthetic sequence derived from human genome
FKTCKEYLRPLKKFLRKLHLPRDLPQKKKLKYMKQSLVVL

SEQ ID NO: 32212 - protein, 40 aa, Artificial Sequence
  Quasi-synthetic sequence derived from human genome
KYKKNLKALYVVHPTSFIKVLWNILKPLISHKFGKKVIYF

SEQ ID NO: 32213 - protein, 40 aa, Artificial Sequence
  Quasi-synthetic sequence derived from human genome
KAKPKKQSKKKVPFWNVQNKIILFTVFLFILAVIAWTLLW

SEQ ID NO: 32214 - protein, 40 aa, Artificial Sequence
  Quasi-synthetic sequence derived from human genome
ISKLKEVTLFVKRLRRKTYLSNMAKTMRMVLKSKRRVSVL

SEQ ID NO: 32215 - protein, 40 aa, Artificial Sequence
  Quasi-synthetic sequence derived from human genome
IKSLRVLRVLRPLKTIKRLPKLKAVFDCVVNSLKNVFNIL

SEQ ID NO: 32216 - protein, 40 aa, Artificial Sequence
  Quasi-synthetic sequence derived from human genome
IKSLRVLRVLRPLKTIKRLPKLKAVFDCVVNSLKNVLNIL

SEQ ID NO: 32217 - protein, 40 aa, Artificial Sequence
  Quasi-synthetic sequence derived from human genome
LKIKLAVRMDKPQNMKHSGYLWAIGKNVWKRWKKRFFVLV

SEQ ID NO: 32218 - protein, 40 aa, Artificial Sequence
  Quasi-synthetic sequence derived from human genome
LRALRLLRIFKVTKYWSSLRNLVVSLLNSMKSIISLLFLL

SEQ ID NO: 32219 - protein, 40 aa, Artificial Sequence
  Quasi-synthetic sequence derived from human genome
LHLVLRLRGGAKKRKKKSYTTPKKNKHKRKKVKLAVLKYY

SEQ ID NO: 32220 - protein, 40 aa, Artificial Sequence
  Quasi-synthetic sequence derived from human genome
LVMAICYTGIIKTLLRCPSKKKYKAIRLIFVIMAVFFIFW

SEQ ID NO: 32221 - protein, 40 aa, Artificial Sequence
  Quasi-synthetic sequence derived from human genome
RRRMPGLGWMKKCYQMIDRRLRKNLKSFIIVHPSWFIRTI

SEQ ID NO: 32222 - protein, 40 aa, Artificial Sequence
  Quasi-synthetic sequence derived from human genome
RRRCCRLCIWLLQTLVHLLQLGQVWRYLRALYLGLQSRWR

SEQ ID NO: 32223 - protein, 40 aa, Artificial Sequence
  Quasi-synthetic sequence derived from human genome
KLLKRLRLLPALLILRAFKPHRKIRDYRVVVVGTAGVGKS

SEQ ID NO: 32224 - protein, 40 aa, Artificial Sequence
  Quasi-synthetic sequence derived from human genome
LVILLVIYVSWKRYPASMKQLQQRSLMRRHRKKKRQSLKQ

SEQ ID NO: 32225 - protein, 40 aa, Artificial Sequence
  Quasi-synthetic sequence derived from human genome
RWRCRRLRAIYTIMRWFRRHKVRAHLAELQRRFQAARQPP

SEQ ID NO: 32226 - protein, 40 aa, Artificial Sequence
  Quasi-synthetic sequence derived from human genome
KHNKKLKKSIKIIFIVVAAFLVSWLPFNTFKFLAIVSGLR

SEQ ID NO: 32227 - protein, 40 aa, Artificial Sequence
  Quasi-synthetic sequence derived from human genome
RKAPLWLRAKFQRLLFKLGCYIQKNCGKFLVVGLLIFGAF

SEQ ID NO: 32228 - protein, 40 aa, Artificial Sequence
  Quasi-synthetic sequence derived from human genome
RIIQFQARCRAYLVRKAFRHRLWAVLTVQAYARGMIARRL

SEQ ID NO: 32229 - protein, 40 aa, Artificial Sequence
  Quasi-synthetic sequence derived from human genome
LAKLKLFRHYYVLIVCYIYFTRIIAFLLKLAVPFQWKWLY

SEQ ID NO: 32230 - protein, 40 aa, Artificial Sequence
  Quasi-synthetic sequence derived from human genome
KVLRGYRYRKEFLRQRRAAVTLQAWWRGYCNRRNFKLILV

SEQ ID NO: 32231 - protein, 40 aa, Artificial Sequence
  Quasi-synthetic sequence derived from human genome
FAGKLLSVFRQPLSSLWRSLVPLFCWLRATFWLLATKRRK

SEQ ID NO: 32232 - protein, 40 aa, Artificial Sequence
  Quasi-synthetic sequence derived from human genome
KRRKSNPKPLVLSEARKQLMIYRLPQVLRLHLKRFRWSGR

SEQ ID NO: 32233 - protein, 40 aa, Artificial Sequence
  Quasi-synthetic sequence derived from human genome
LIKPFGARKKRSWYLTWKYKLTNQRALRRFCQTGAVLFLL

SEQ ID NO: 32234 - protein, 40 aa, Artificial Sequence
  Quasi-synthetic sequence derived from human genome
YLRGFLARNRYRKILREHKAVIIQKRVRGWLARTHYKRSM

SEQ ID NO: 32235 - protein, 40 aa, Artificial Sequence
  Quasi-synthetic sequence derived from human genome
FRLIRKMFSFKVSRWMGLACFRSLAASSPSIRQKKLMHKL

SEQ ID NO: 32236 - protein, 40 aa, Artificial Sequence
  Quasi-synthetic sequence derived from human genome
LFLSVAMILLVIYVSWKRYPASMKQLQQHSLMKRRRKKAR

SEQ ID NO: 32237 - protein, 40 aa, Artificial Sequence
  Quasi-synthetic sequence derived from human genome
VIIFFAFVLLLSGALAYCLALQLYVRRRKKLPSVLLFKKP

SEQ ID NO: 32238 - protein, 40 aa, Artificial Sequence
  Quasi-synthetic sequence derived from human genome
LSMFYLLRIANFSNLIFLRIKRRVKSVVLVILLGPLLFLV

SEQ ID NO: 32239 - protein, 40 aa, Artificial Sequence
  Quasi-synthetic sequence derived from human genome
RRPSPYWRLTWRVVSPLLLTIFVAYIILLFWKPLRYKAWN

SEQ ID NO: 32240 - protein, 40 aa, Artificial Sequence
  Quasi-synthetic sequence derived from human genome
PVPLSVLILSLLVLFFSAVFVAAGLFAYVLRRRRKKLPFR

SEQ ID NO: 32241 - protein, 40 aa, Artificial Sequence
  Quasi-synthetic sequence derived from human genome
LCRRAVKILKKKKLRRIPNGEANVKKEIQLLRRLRHKNVI

SEQ ID NO: 32242 - protein, 40 aa, Artificial Sequence
  Quasi-synthetic sequence derived from human genome
FRNLRLPKRLRVVYFLARTRLAQRLIMAGTVVWIGILVYT

SEQ ID NO: 32243 - protein, 40 aa, Artificial Sequence
  Quasi-synthetic sequence derived from human genome
KPSRPKTSFNWFVNPLKTFVFFIWRRYWRTLVLLLLVLLT

SEQ ID NO: 32244 - protein, 40 aa, Artificial Sequence
  Quasi-synthetic sequence derived from human genome
LFCSFKIVWSLRRRQQLARQARMKKATRFIMVVAIVFITC

SEQ ID NO: 32245 - protein, 40 aa, Artificial Sequence
  Quasi-synthetic sequence derived from human genome
ILRTLFRSRSKRRHRTVKLIFAIVVAYFLSWGPYNFTLFL

SEQ ID NO: 32246 - protein, 40 aa, Artificial Sequence
  Quasi-synthetic sequence derived from human genome
LLLLLVVCGIGCVWHWKHRVATRFTLPRFLQRRSSRRKVC

SEQ ID NO: 32247 - protein, 40 aa, Artificial Sequence
  Quasi-synthetic sequence derived from human genome
KYLKVFYKFLNSNRPKIRHTEKKSFKCKKRVKLFCMLSHK

SEQ ID NO: 32248 - protein, 40 aa, Artificial Sequence
  Quasi-synthetic sequence derived from human genome
AKKSAKLYIPYIILTIIILTIVGFIWLLKVNGCRKYKLNK

SEQ ID NO: 32249 - protein, 40 aa, Artificial Sequence
  Quasi-synthetic sequence derived from human genome
KILWKVPSFLITQVRRMNEATMLLKKQLPSVRKLLRRKTL

SEQ ID NO: 32250 - protein, 40 aa, Artificial Sequence
  Quasi-synthetic sequence derived from human genome
LSLGRKKAPHRLCGRFSRISMKLPRIPLRRQKLPKVVVAH

SEQ ID NO: 32251 - protein, 40 aa, Artificial Sequence
  Quasi-synthetic sequence derived from human genome
NIFYFLYGKTRSRIPLLRKRRFQLCRCMNPRARKNRSQIV

SEQ ID NO: 32252 - protein, 40 aa, Artificial Sequence
  Quasi-synthetic sequence derived from human genome
CWKFFMARVRLQLKIILCFSPVGRTLRVRARKFPAIVNCT

SEQ ID NO: 32253 - protein, 40 aa, Artificial Sequence
  Quasi-synthetic sequence derived from human genome
TVFLLAILGGMAFILLVLLCLLLYYCRRKCLKPRQHHRKL

SEQ ID NO: 32254 - protein, 40 aa, Artificial Sequence
  Quasi-synthetic sequence derived from human genome
LRKYIYIRSCVVIIQKRFRCFQAQKLYKRRKESILTIQKY

SEQ ID NO: 32255 - protein, 40 aa, Artificial Sequence
  Quasi-synthetic sequence derived from human genome
CKQRFTKITQYLIRIRKLTLKRQRKLVPLSKKVERREKRR

SEQ ID NO: 32256 - protein, 40 aa, Artificial Sequence
  Quasi-synthetic sequence derived from human genome
LSIFYLLKIANFSNLIFLRLKRRVKSVILVVLLGPLLFLA

SEQ ID NO: 32257 - protein, 40 aa, Artificial Sequence
  Quasi-synthetic sequence derived from human genome
FLFAFFIFIMSLLLISGQRPVNLTMRRKLRKHNCLQRRCM

SEQ ID NO: 32258 - protein, 40 aa, Artificial Sequence
  Quasi-synthetic sequence derived from human genome
LTKIPIFSLFRKWKAFSVWRKNVRSKKITGCQKSLQKNLF

SEQ ID NO: 32259 - protein, 40 aa, Artificial Sequence
  Quasi-synthetic sequence derived from human genome
FFNSKVALFAAVGAGCVIFLLIIIFLTVLLLKLRKRHRKH

SEQ ID NO: 32260 - protein, 40 aa, Artificial Sequence
  Quasi-synthetic sequence derived from human genome
RPFQCCFCQKGFKIQSKLLKHKQIHTRNKAFRALLLKKRR

SEQ ID NO: 32261 - protein, 40 aa, Artificial Sequence
  Quasi-synthetic sequence derived from human genome
RSKKKKKKKKKRQCFAFLIYFRLGIKMGKQGIINKEGYLY

SEQ ID NO: 32262 - protein, 40 aa, Artificial Sequence
  Quasi-synthetic sequence derived from human genome
LLKLVHGSPLVFGEKFKLFTLVSACIPVFRLARRRKKILF

SEQ ID NO: 32263 - protein, 40 aa, Artificial Sequence
  Quasi-synthetic sequence derived from human genome
NTVTLIILAVVGGVIGLLILILLIKKLIIFILKKTREKKK

SEQ ID NO: 32264 - protein, 40 aa, Artificial Sequence
  Quasi-synthetic sequence derived from human genome
IVRSWSLALTWALNYRTGVRLRGAILTMAFKKILKLKNIK

SEQ ID NO: 32265 - protein, 40 aa, Artificial Sequence
  Quasi-synthetic sequence derived from human genome
LFARGAPAWLRRRYLRLRYEDLVRQPRAQLRRLLRFSGLR

SEQ ID NO: 32266 - protein, 40 aa, Artificial Sequence
  Quasi-synthetic sequence derived from human genome
FLPARQLWKWFGKPTQRRGMKGKARKLFYKAIVRGKEMIR

SEQ ID NO: 32267 - protein, 40 aa, Artificial Sequence
  Quasi-synthetic sequence derived from human genome
LTGLYGFIFYLLASVLLSLLLILKAGRRWNKYFKSRRPLF

SEQ ID NO: 32268 - protein, 40 aa, Artificial Sequence
  Quasi-synthetic sequence derived from human genome
RRCKKRMFKFHQMKHIFEILDKMRCLRKRSTVSFLGVLVI

SEQ ID NO: 32269 - protein, 40 aa, Artificial Sequence
  Quasi-synthetic sequence derived from human genome
RRKMPSLGWLRKCYQQIDRRLRKNLKSLIIVHPSWFIRTL

SEQ ID NO: 32270 - protein, 40 aa, Artificial Sequence
  Quasi-synthetic sequence derived from human genome
RRELSLGRKKAPHRLCGRFSRISMKLPRIPLRRQKLPKVV

SEQ ID NO: 32271 - protein, 40 aa, Artificial Sequence
  Quasi-synthetic sequence derived from human genome
RFKKGKIVLLFSLLCWVLFNLGIGFVKPATLRCVPKIRPT

SEQ ID NO: 32272 - protein, 40 aa, Artificial Sequence
  Quasi-synthetic sequence derived from human genome
KIQAWARMWAARRQYLRRLHYFQKNVNSIVKIQAFFRARK

SEQ ID NO: 32273 - protein, 40 aa, Artificial Sequence
  Quasi-synthetic sequence derived from human genome
KLYACKKLNKKRLKKRKGYQGAMVEKKILMKVHSRFIVSL

SEQ ID NO: 32274 - protein, 40 aa, Artificial Sequence
  Quasi-synthetic sequence derived from human genome
LNFQRALALFVITCLVIFVLVHSFLKKLLGKKLTRCLKPF

SEQ ID NO: 32275 - protein, 40 aa, Artificial Sequence
  Quasi-synthetic sequence derived from human genome
RKLKFFFMNPCEKFWARGRKPWKLAIQILKIAMVTIQLVL

SEQ ID NO: 32276 - protein, 40 aa, Artificial Sequence
  Quasi-synthetic sequence derived from human genome
VLWQQLQFIPFFKYCLLRKSFTCWKKNVRLQGLHRLQKFL

SEQ ID NO: 32277 - protein, 40 aa, Artificial Sequence
  Quasi-synthetic sequence derived from human genome
LKTLLRCRNEKKRHRAVRLIFTIMIVYFLFWAPYNIVLLL

SEQ ID NO: 32278 - protein, 40 aa, Artificial Sequence
  Quasi-synthetic sequence derived from human genome
FFLFLLSATFNASFLLKLQKWTQKKEKGKKLSRMKLLLKH

SEQ ID NO: 32279 - protein, 40 aa, Artificial Sequence
  Quasi-synthetic sequence derived from human genome
KYLKVFYKFLNSNRHTIRHTGKKCFKCKKCVKSFCIRLHK

SEQ ID NO: 32280 - protein, 40 aa, Artificial Sequence
  Quasi-synthetic sequence derived from human genome
LQFQNVRRVVQIFRIMRILRILKLARHSTGLQSLGFTLRR

SEQ ID NO: 32281 - protein, 40 aa, Artificial Sequence
  Quasi-synthetic sequence derived from human genome
YTFPPLYYRRAHRRFVTKKALCIRVFQETQKLKKRRRALK

SEQ ID NO: 32282 - protein, 40 aa, Artificial Sequence
  Quasi-synthetic sequence derived from human genome
VRSGLLTVMVWVSSIFFFLPVFCLTVLYSLIGRKLWRRRR

SEQ ID NO: 32283 - protein, 40 aa, Artificial Sequence
  Quasi-synthetic sequence derived from human genome
RPGATGRRRRRLRRRPRGLRCSRLPPPPPLPLLLGLLLAA

SEQ ID NO: 32284 - protein, 40 aa, Artificial Sequence
  Quasi-synthetic sequence derived from human genome
YLGLARKKSGILLLTLVSFLIFILFIIVQLFIMKLRKAHV

SEQ ID NO: 32285 - protein, 40 aa, Artificial Sequence
  Quasi-synthetic sequence derived from human genome
RALRYYYNKRILHKTKGKRFTYKFNFNKLVMPNYPFINIR

SEQ ID NO: 32286 - protein, 40 aa, Artificial Sequence
  Quasi-synthetic sequence derived from human genome
FLVVVALLCVPWMLLFKPLVLRRQYLRRKHLGTLNFGGIR

SEQ ID NO: 32287 - protein, 40 aa, Artificial Sequence
  Quasi-synthetic sequence derived from human genome
FLTALLWRGRIPGRQWIGKHRRPRFVSLRAKQNMIRRLEI

SEQ ID NO: 32288 - protein, 40 aa, Artificial Sequence
  Quasi-synthetic sequence derived from human genome
RRKGRHMGIGKRKGTANARMPEKVTWMRRMRILRRLLRRY

SEQ ID NO: 32289 - protein, 40 aa, Artificial Sequence
  Quasi-synthetic sequence derived from human genome
RRQKLLLAQLHHRKRVKAAGQIQAWWRGVLVRRTLLVAAL

SEQ ID NO: 32290 - protein, 40 aa, Artificial Sequence
  Quasi-synthetic sequence derived from human genome
LKKLLGKKLTRCLKPFENSRLRLWTKWVFAGVSLVGLILW

SEQ ID NO: 32291 - protein, 40 aa, Artificial Sequence
  Quasi-synthetic sequence derived from human genome
TLGFIVPFAIIGLCYSLIVRVLVRAHRHRGLRPRRQKALR

SEQ ID NO: 32292 - protein, 40 aa, Artificial Sequence
  Quasi-synthetic sequence derived from human genome
RLRPRLHFCLVLLLLLVVPAAWGCGPGRVVGSRRRPPRKL

SEQ ID NO: 32293 - protein, 40 aa, Artificial Sequence
  Quasi-synthetic sequence derived from human genome
KFIVWRRFKWVIIGLLFLLILLLFVAVLLYSLPNYLSMKI

SEQ ID NO: 32294 - protein, 40 aa, Artificial Sequence
  Quasi-synthetic sequence derived from human genome
AMSLAILRVIRLVRVFRIFKLSRHSKGLQILGQTLKASMR

SEQ ID NO: 32295 - protein, 40 aa, Artificial Sequence
  Quasi-synthetic sequence derived from human genome
KKCIVLVTELMTSGTLKTYLKRFKVMKIKVLRSWCRQILK

SEQ ID NO: 32296 - protein, 40 aa, Artificial Sequence
  Quasi-synthetic sequence derived from human genome
KPFFRLQKFLRRTQFLLFFLTAAYLMTGSLLLLQRVRVAL

SEQ ID NO: 32297 - protein, 40 aa, Artificial Sequence
  Quasi-synthetic sequence derived from human genome
ILRSHLIKATVIPNRVKMLPYFGIIRNRMMSTHKSKKKIR

SEQ ID NO: 32298 - protein, 40 aa, Artificial Sequence
  Quasi-synthetic sequence derived from human genome
LFSKLVLKLPWTQVGFSLLFLYLGSGGWRFIRVFIKTIRR

SEQ ID NO: 32299 - protein, 40 aa, Artificial Sequence
  Quasi-synthetic sequence derived from human genome
LVRKAFRHRLWAVLTVQAYARGMIARRLHQRLRAEYLWRL

SEQ ID NO: 32300 - protein, 40 aa, Artificial Sequence
  Quasi-synthetic sequence derived from human genome
FSSTLVLIVLVTLIFCLIVLSLSTFHIHKRRMKKRKMQRA

SEQ ID NO: 32301 - protein, 40 aa, Artificial Sequence
  Quasi-synthetic sequence derived from human genome
IILKLYRVLQLFLSRTAQRSALLSSGRLLRRLGLLLLPVL

SEQ ID NO: 32302 - protein, 40 aa, Artificial Sequence
  Quasi-synthetic sequence derived from human genome
WRRRHCCFAKMTWNAKRSLFRTHLIGVLSLVFLFAMFLFF

SEQ ID NO: 32303 - protein, 40 aa, Artificial Sequence
  Quasi-synthetic sequence derived from human genome
RRHFRMKLRNLFTKFIRKFGFELVKRLLPEEYHRVLVNIR

SEQ ID NO: 32304 - protein, 40 aa, Artificial Sequence
  Quasi-synthetic sequence derived from human genome
LKIKLAVRMDKPAHMKHSGYLYALGQKVWKRWKKRYFVLV

SEQ ID NO: 32305 - protein, 40 aa, Artificial Sequence
  Quasi-synthetic sequence derived from human genome
KAKKAQLMQYLSLPKTPKMLKMSKGLDARSKRWLKIIWRR

SEQ ID NO: 32306 - protein, 40 aa, Artificial Sequence
  Quasi-synthetic sequence derived from human genome
RCWIYNKTKMAFLLVGICFLCKLCTIIFTTIAFFIYKRRL

SEQ ID NO: 32307 - protein, 40 aa, Artificial Sequence
  Quasi-synthetic sequence derived from human genome
WFRLSFVYNHYLFFACILVVLLAIFLYLLRLRRIHHRQTR

SEQ ID NO: 32308 - protein, 40 aa, Artificial Sequence
  Quasi-synthetic sequence derived from human genome
IVAAMRRIRYEFKAKNIKKKKVSIMVSVDGVKVILKKKKK

SEQ ID NO: 32309 - protein, 40 aa, Artificial Sequence
  Quasi-synthetic sequence derived from human genome
WRGVSFVYNHYLFSGCFLVVLLAILLYLLRLRRIHRRTPR

SEQ ID NO: 32310 - protein, 40 aa, Artificial Sequence
  Quasi-synthetic sequence derived from human genome
VIIALRRAVKRHRERRERQKRVFRMSLLIISTFLLCWTPI

SEQ ID NO: 32311 - protein, 40 aa, Artificial Sequence
  Quasi-synthetic sequence derived from human genome
HKPLREWFVIVIMATICFILLILSLICKIKLGPVRRKLKS

SEQ ID NO: 32312 - protein, 40 aa, Artificial Sequence
  Quasi-synthetic sequence derived from human genome
RRYFREATMKMAVMIFKRGVFESRRKNKAVFRPKIRINLR

SEQ ID NO: 32313 - protein, 40 aa, Artificial Sequence
  Quasi-synthetic sequence derived from human genome
WIRQCYRTLDRRLRKNLRALVVVHATWYVKAFLALLRPFI

SEQ ID NO: 32314 - protein, 40 aa, Artificial Sequence
  Quasi-synthetic sequence derived from human genome
RFLLKCGFITIPWRCIKKCSPLMPRAAVPRFVQQKLYLFL

SEQ ID NO: 32315 - protein, 40 aa, Artificial Sequence
  Quasi-synthetic sequence derived from human genome
RRLRLQQLATLIQKIYRGWRCRTHYQLMRKSQILISSWFR

SEQ ID NO: 32316 - protein, 40 aa, Artificial Sequence
  Quasi-synthetic sequence derived from human genome
GRKWHKASNYIFVAIFWIVFLLLIVFYTAITKKIFKSHLK

SEQ ID NO: 32317 - protein, 40 aa, Artificial Sequence
  Quasi-synthetic sequence derived from human genome
ILRIIRLVRVFRIFKLSRHSKGLQILGHTLRASMRELGLL

SEQ ID NO: 32318 - protein, 40 aa, Artificial Sequence
  Quasi-synthetic sequence derived from human genome
KRKAPRGFLKRVFKRKKPQLRLEKSGDLLVHLNCLLFVHR

SEQ ID NO: 32319 - protein, 40 aa, Artificial Sequence
  Quasi-synthetic sequence derived from human genome
VPLSVLILGLLIMFITIVFCAAGIVVLVLHRRRRYKKKQV

SEQ ID NO: 32320 - protein, 40 aa, Artificial Sequence
  Quasi-synthetic sequence derived from human genome
LLIYLRVATWNQILDPWVYILFRRAVLRRLQPRLSTRPRR

SEQ ID NO: 32321 - protein, 40 aa, Artificial Sequence
  Quasi-synthetic sequence derived from human genome
RMRGFQARKRYLRRRAALGQLNTILLVAQPLLQRRQRLQL

SEQ ID NO: 32322 - protein, 40 aa, Artificial Sequence
  Quasi-synthetic sequence derived from human genome
FVWYTPPTFMIAVFLPIVVLIFKSILFLPCLRKKILKIRH

SEQ ID NO: 32323 - protein, 40 aa, Artificial Sequence
  Quasi-synthetic sequence derived from human genome
TVNIPLFRRFGRQRKIGGRGRIISPYRTPVLRRHRYSIFR

SEQ ID NO: 32324 - protein, 40 aa, Artificial Sequence
  Quasi-synthetic sequence derived from human genome
RFLGRHFPRFYVLYTIFMKGLQMLWADAKKARRIKTNMWK

SEQ ID NO: 32325 - protein, 40 aa, Artificial Sequence
  Quasi-synthetic sequence derived from human genome
LTSIISAVVGILLVVVLGVVFGILIKRRQQKIRKYTMRRL

SEQ ID NO: 32326 - protein, 40 aa, Artificial Sequence
  Quasi-synthetic sequence derived from human genome
WRFIRVFIKTIRRDIFGGLVLLKVKAKVRQCLQERRTVPI

SEQ ID NO: 32327 - protein, 40 aa, Artificial Sequence
  Quasi-synthetic sequence derived from human genome
LGVCANGLLIYRDRLRINRFAWPKILKISYKRSNFYIKIR

SEQ ID NO: 32328 - protein, 40 aa, Artificial Sequence
  Quasi-synthetic sequence derived from human genome
RLGLPARPWPRWLGVAALGLAAVALGTVAWRRAWPRRRRR

SEQ ID NO: 32329 - protein, 40 aa, Artificial Sequence
  Quasi-synthetic sequence derived from human genome
ILLIISSILGSVWLAYKTPKLLRTARGRRIKKCATQLCRR

SEQ ID NO: 32330 - protein, 40 aa, Artificial Sequence
  Quasi-synthetic sequence derived from human genome
KCLLLTGGCTLLHCFVILPVFLTFFPPSKKHHKKKKRAKR

SEQ ID NO: 32331 - protein, 40 aa, Artificial Sequence
  Quasi-synthetic sequence derived from human genome
PLLYFLFICPFVLLLLLLISLLCLYWKARKLSTLRSNTRK

SEQ ID NO: 32332 - protein, 40 aa, Artificial Sequence
  Quasi-synthetic sequence derived from human genome
GQKAPRPAARRKARRLLKTVLMILLAFLVCWGPLFGLLLA

SEQ ID NO: 32333 - protein, 40 aa, Artificial Sequence
  Quasi-synthetic sequence derived from human genome
IVSQRKQIKRKAPRGFLKRVFKRKKPQLRLEKSGDLLVRF

SEQ ID NO: 32334 - protein, 40 aa, Artificial Sequence
  Quasi-synthetic sequence derived from human genome
WKAQRYRLIREFHSRPALAPPFIVISHLRLLLRQLCRRPR

SEQ ID NO: 32335 - protein, 40 aa, Artificial Sequence
  Quasi-synthetic sequence derived from human genome
MKKFLYIKSVFHTLRMAQRRHKRVRTWTRHINIFNKDYIF

SEQ ID NO: 32336 - protein, 40 aa, Artificial Sequence
  Quasi-synthetic sequence derived from human genome
KIQDYHILTRKRIRYRFRRFIQQFSQCKATARNLKLKYLI

SEQ ID NO: 32337 - protein, 40 aa, Artificial Sequence
  Quasi-synthetic sequence derived from human genome
RFLCGFLVPVLIITACYLTIVCKLQRNRLAKTKKPFKIIV

SEQ ID NO: 32338 - protein, 40 aa, Artificial Sequence
  Quasi-synthetic sequence derived from human genome
VGCRLSRALLTAVTNVLIFFWCLAFLWGLLILLKYRWRKL

SEQ ID NO: 32339 - protein, 40 aa, Artificial Sequence
  Quasi-synthetic sequence derived from human genome
LYRELGLFQGPALGLRNHLGRKLRRRKKKKAKRTTNWKII

SEQ ID NO: 32340 - protein, 40 aa, Artificial Sequence
  Quasi-synthetic sequence derived from human genome
KKAVWHKLLSKQRKRAVVACFRMAPLYNLPRHRSINLFLH

SEQ ID NO: 32341 - protein, 40 aa, Artificial Sequence
  Quasi-synthetic sequence derived from human genome
RLDAEVYKTARALRIVRFTKILSLLRLLRLSRLIRYIHQW

SEQ ID NO: 32342 - protein, 40 aa, Artificial Sequence
  Quasi-synthetic sequence derived from human genome
LKIVILGLVLPLLVMVICYSGILKTLLRCRNEKKRHRAVR

SEQ ID NO: 32343 - protein, 40 aa, Artificial Sequence
  Quasi-synthetic sequence derived from human genome
RLRHPRTRWKNWWVRGILTLAMIAFFFIIIYLGPMVLMII

SEQ ID NO: 32344 - protein, 40 aa, Artificial Sequence
  Quasi-synthetic sequence derived from human genome
KKIVERRDALLVIQWNIRAFMGVKNWPWMKLYFKIKPLLK

SEQ ID NO: 32345 - protein, 40 aa, Artificial Sequence
  Quasi-synthetic sequence derived from human genome
RLLFAKLFGHLTSARRARKSEVPHFRLKKVQNIKMWLSLR

SEQ ID NO: 32346 - protein, 40 aa, Artificial Sequence
  Quasi-synthetic sequence derived from human genome
RLFRIKCVTRIQAYWRGCVVRKWYRNLRKTVPPTDAKLRK

SEQ ID NO: 32347 - protein, 40 aa, Artificial Sequence
  Quasi-synthetic sequence derived from human genome
WRRVLAQRKLLMLKKEKLEKVQNKAASLIQAMWRRYRAKK

SEQ ID NO: 32348 - protein, 40 aa, Artificial Sequence
  Quasi-synthetic sequence derived from human genome
WKKYYEIVMLCGLLKMWEDLRLRVHGPFFPRILRRRKGKR

SEQ ID NO: 32349 - protein, 40 aa, Artificial Sequence
  Quasi-synthetic sequence derived from human genome
YRHWQIPLGRRFRSLKMWFVFRMYGVKGLQAYIRKHVQLS

SEQ ID NO: 32350 - protein, 40 aa, Artificial Sequence
  Quasi-synthetic sequence derived from human genome
ILAKISRPKKRAKTITFSKNAVISKRGGKLCLLIRVANLR

SEQ ID NO: 32351 - protein, 40 aa, Artificial Sequence
  Quasi-synthetic sequence derived from human genome
LKLHRVLKVFLSRTAQRIPYMTGGRVMRMLAVILLVVFWF

SEQ ID NO: 32352 - protein, 40 aa, Artificial Sequence
  Quasi-synthetic sequence derived from human genome
RSRSVVRRRSFSISPVRLRRSRTPLRRRFSRSPIRRKRSR

SEQ ID NO: 32353 - protein, 40 aa, Artificial Sequence
  Quasi-synthetic sequence derived from human genome
MMFVRNDCKVFRFCKSKCHKNFKKKRNPRKVRWTKAFRKA

SEQ ID NO: 32354 - protein, 40 aa, Artificial Sequence
  Quasi-synthetic sequence derived from human genome
SWFRGNMQKKCYGKIKASVLLIQAFVRGWKARKNYRKYFR

SEQ ID NO: 32355 - protein, 40 aa, Artificial Sequence
  Quasi-synthetic sequence derived from human genome
MVIRFPGRRGYGRLRPRARSLSKASTAINWLTKKFLLKKA

SEQ ID NO: 32356 - protein, 40 aa, Artificial Sequence
  Quasi-synthetic sequence derived from human genome
KLSKRQLFFRKKLLHSSQMLRAVSLGQDRYRRRYWVLPYL

SEQ ID NO: 32357 - protein, 40 aa, Artificial Sequence
  Quasi-synthetic sequence derived from human genome
RRTRSGVGWKRVLRSLCHSRTRVPLLAAIYFLMIHVLLIL

SEQ ID NO: 32358 - protein, 40 aa, Artificial Sequence
  Quasi-synthetic sequence derived from human genome
LVKRLHKVLRPFLLRRVKVDVEKQMPKKYEHVIRCRLSKR

SEQ ID NO: 32359 - protein, 40 aa, Artificial Sequence
  Quasi-synthetic sequence derived from human genome
VVVMKFFRWVRRAWQRIISWVFFWRQKIKPTISGHPDSKK

SEQ ID NO: 32360 - protein, 40 aa, Artificial Sequence
  Quasi-synthetic sequence derived from human genome
RATVRALWFWAFSLQAKVWATWLAFVLERRRKKARLQWAL

SEQ ID NO: 32361 - protein, 40 aa, Artificial Sequence
  Quasi-synthetic sequence derived from human genome
KLLKDGGVLSPILTRLMNFFVFSRGLLQYINQRKKFRRRW

SEQ ID NO: 32362 - protein, 40 aa, Artificial Sequence
  Quasi-synthetic sequence derived from human genome
QGAIYAGIVIALLFLCLLPLIVKHIRKKQAKKAAAIRAKK

SEQ ID NO: 32363 - protein, 40 aa, Artificial Sequence
  Quasi-synthetic sequence derived from human genome
RFLARRTNSTFNQVVLKRLFMSRTNRPPLSLSRMIRKMKL

SEQ ID NO: 32364 - protein, 40 aa, Artificial Sequence
  Quasi-synthetic sequence derived from human genome
WLLLVLVLVLLVSPRGCRARRGLRGLLMAHSQRLLFRIGY

SEQ ID NO: 32365 - protein, 40 aa, Artificial Sequence
  Quasi-synthetic sequence derived from human genome
WVHANRPKRLLLVLVSAFFIFWSPFNVVLLVHLWRRVMLK

SEQ ID NO: 32366 - protein, 40 aa, Artificial Sequence
  Quasi-synthetic sequence derived from human genome
TRLKRVLSGATLPDKLRDKLKLMKQRRKPPGFLALVKLLR

SEQ ID NO: 32367 - protein, 40 aa, Artificial Sequence
  Quasi-synthetic sequence derived from human genome
LLSVLAMFFLLVLILSSVFLFRLFKRRQGRIFPEGKMWKL

SEQ ID NO: 32368 - protein, 40 aa, Artificial Sequence
  Quasi-synthetic sequence derived from human genome
LKIIRPLRNIFLKKPVFAKTVSIFIWFFLFFISLPNTILS

SEQ ID NO: 32369 - protein, 40 aa, Artificial Sequence
  Quasi-synthetic sequence derived from human genome
LWCWWRRRGAAKAGPSGCRRWGQAISKSKLSRRWRRWNRF

SEQ ID NO: 32370 - protein, 40 aa, Artificial Sequence
  Quasi-synthetic sequence derived from human genome
RFLNLKKTIIKFQAHVRKHQQRQKYKKMKKAAVIIQTHFR

SEQ ID NO: 32371 - protein, 40 aa, Artificial Sequence
  Quasi-synthetic sequence derived from human genome
KASRSKTRLKSQLLLQKYIAQRKWKKHFYVVTAANRLRKF

SEQ ID NO: 32372 - protein, 40 aa, Artificial Sequence
  Quasi-synthetic sequence derived from human genome
HRHGFRCQFANGIFQLWFHFKRYRYRRPGPCWRPIRHCRR

SEQ ID NO: 32373 - protein, 40 aa, Artificial Sequence
  Quasi-synthetic sequence derived from human genome
RRRRARSSVCRRKVAQAREKRFTFVLAVVMGVFVLCWFPF

SEQ ID NO: 32374 - protein, 40 aa, Artificial Sequence
  Quasi-synthetic sequence derived from human genome
IKLGVCANGLLIYKDRLRINRFAWPKILKISYKRSNFYIK

SEQ ID NO: 32375 - protein, 40 aa, Artificial Sequence
  Quasi-synthetic sequence derived from human genome
RTGGWKVSAVTLAYLIFCLCSLVGILHLQRALVLRRKRKR

SEQ ID NO: 32376 - protein, 40 aa, Artificial Sequence
  Quasi-synthetic sequence derived from human genome
RIKTSIFSLFRAPKLRMRVFGLCFVRFAITVPFYGLILNL

SEQ ID NO: 32377 - protein, 40 aa, Artificial Sequence
  Quasi-synthetic sequence derived from human genome
LKHRGSSLHPFRKGLQEKDKVWLLREQKRKKKLRKLLKRL

SEQ ID NO: 32378 - protein, 40 aa, Artificial Sequence
  Quasi-synthetic sequence derived from human genome
RPKRYFTIVIISSSLLLGLIVLLLISYVMWKAGFFKRQYK

SEQ ID NO: 32379 - protein, 40 aa, Artificial Sequence
  Quasi-synthetic sequence derived from human genome
RWARPFYLAFVFCLALGLLQAIKLYLRRQRLLRDLRPFPA

SEQ ID NO: 32380 - protein, 40 aa, Artificial Sequence
  Quasi-synthetic sequence derived from human genome
LHVVLSSKVCRGYLVKMGGKIKSWKKRWFVFDRLKRTLSY

SEQ ID NO: 32381 - protein, 40 aa, Artificial Sequence
  Quasi-synthetic sequence derived from human genome
RLKIKQILPTIYKRKNLSLFLSISLLIFWGSSLLGARLYW

SEQ ID NO: 32382 - protein, 40 aa, Artificial Sequence
  Quasi-synthetic sequence derived from human genome
RYKFYLPPTFTLTLLVPCVVILAKALFLLPCISRRLARIR

SEQ ID NO: 32383 - protein, 40 aa, Artificial Sequence
  Quasi-synthetic sequence derived from human genome
AKILGVLRVLRLLRTLRPLRVISRAPGLKLVVETLISSLR

SEQ ID NO: 32384 - protein, 40 aa, Artificial Sequence
  Quasi-synthetic sequence derived from human genome
RKAFAKKQQQLSALKVLQRNCAAYLKLRHWQWWRVFTKVK

SEQ ID NO: 32385 - protein, 40 aa, Artificial Sequence
  Quasi-synthetic sequence derived from human genome
RIIRLVRVFRIFKLSRHSKGLQILGQTLKASMRELGLLIF

SEQ ID NO: 32386 - protein, 40 aa, Artificial Sequence
  Quasi-synthetic sequence derived from human genome
LRTFRLLRVLKLVRFMPALRRQLVVLMKTMDNVATFCMLL

SEQ ID NO: 32387 - protein, 40 aa, Artificial Sequence
  Quasi-synthetic sequence derived from human genome
NIFHFLYGKNRSRIPLLRKRRFQLYRSMNPRARKNRSHIP

SEQ ID NO: 32388 - protein, 40 aa, Artificial Sequence
  Quasi-synthetic sequence derived from human genome
QHKMLRLRLPNLKMVRLRVSFSAVVFKAVSDICKILNIRR

SEQ ID NO: 32389 - protein, 40 aa, Artificial Sequence
  Quasi-synthetic sequence derived from human genome
ACLIQAYWKGFQTRKRLKKLPSAVIALQRSFRSKRSKMLL

SEQ ID NO: 32390 - protein, 40 aa, Artificial Sequence
  Quasi-synthetic sequence derived from human genome
LKNLSLLKLLKSSNRRIQELHKLAKRCWHSLLSVPKILRI

SEQ ID NO: 32391 - protein, 40 aa, Artificial Sequence
  Quasi-synthetic sequence derived from human genome
FLRVVRFVRILRIFKLTRHFVGLRVLGHTLRASTNEFLLL

SEQ ID NO: 32392 - protein, 40 aa, Artificial Sequence
  Quasi-synthetic sequence derived from human genome
KGQKKKKIVKYGMGGLIILFLIAIIWFPLLFMSLVRSVVG

SEQ ID NO: 32393 - protein, 40 aa, Artificial Sequence
  Quasi-synthetic sequence derived from human genome
LRPAVCNDLSIMSKFKLLSSLPRWRRIAQKIIRERRKKRV

SEQ ID NO: 32394 - protein, 40 aa, Artificial Sequence
  Quasi-synthetic sequence derived from human genome
KRAIRIILSFFFLFLLYFLAFLIASFGNFLPKTKMAKMIG

SEQ ID NO: 32395 - protein, 40 aa, Artificial Sequence
  Quasi-synthetic sequence derived from human genome
RKLITKYNRRELTDKLLIFLALALFLATVLYIVKKRLFPF

SEQ ID NO: 32396 - protein, 40 aa, Artificial Sequence
  Quasi-synthetic sequence derived from human genome
WVALVLHLRAHSAAKRPIACPKCERRFWRRKQLRAHLRRC

SEQ ID NO: 32397 - protein, 40 aa, Artificial Sequence
  Quasi-synthetic sequence derived from human genome
LWFQLCRYMNPRARKNCSQIALFRKYRFHFFCSMRCRAWV

SEQ ID NO: 32398 - protein, 40 aa, Artificial Sequence
  Quasi-synthetic sequence derived from human genome
FLRKCFAISLLVICIIISIGIFYGFVANHQVRTRIKRSRK

SEQ ID NO: 32399 - protein, 40 aa, Artificial Sequence
  Quasi-synthetic sequence derived from human genome
WIRTKPSDIIRKYISKYSVFLRHRYQSRSAFLGRYLKKKK

SEQ ID NO: 32400 - protein, 40 aa, Artificial Sequence
  Quasi-synthetic sequence derived from human genome
LGVCASGLLIYRDRLRINRFAWPKVLKISYKRNNFYIKIR

SEQ ID NO: 32401 - protein, 40 aa, Artificial Sequence
  Quasi-synthetic sequence derived from human genome
ILQRVLLLFRAAQCSFPVAQWYILQLRWARKVMQKIRMKG

SEQ ID NO: 32402 - protein, 40 aa, Artificial Sequence
  Quasi-synthetic sequence derived from human genome
LLALALVGVLILFMFRRLRQFRQAQPTPQYRFRKRDKVMF

SEQ ID NO: 32403 - protein, 40 aa, Artificial Sequence
  Quasi-synthetic sequence derived from human genome
LKTLLRCRNEKKRHRAVRVIFTIMIVYFLFWTPYNIVILL

SEQ ID NO: 32404 - protein, 40 aa, Artificial Sequence
  Quasi-synthetic sequence derived from human genome
WRAAVPIGLLVCLCLLQAFGYRLRRVIAAFYFPKREKKRI

SEQ ID NO: 32405 - protein, 40 aa, Artificial Sequence
  Quasi-synthetic sequence derived from human genome
KKLVPVRRRAWGQLCLPPQRLRVTRHPLIPAPVLGLLLLL

SEQ ID NO: 32406 - protein, 40 aa, Artificial Sequence
  Quasi-synthetic sequence derived from human genome
IRTKAAVKIQAWWRGTLVRRTLLHAALRAWIIQCWWRMTL

SEQ ID NO: 32407 - protein, 40 aa, Artificial Sequence
  Quasi-synthetic sequence derived from human genome
KKKIFVFLEHQTKVLKKRHTKEKVLRRAKRRWAPIPCSML

SEQ ID NO: 32408 - protein, 40 aa, Artificial Sequence
  Quasi-synthetic sequence derived from human genome
LQRRKFLQMKRRKYGFIYKTHLFGRPTVRVMGADNVRRIL

SEQ ID NO: 32409 - protein, 40 aa, Artificial Sequence
  Quasi-synthetic sequence derived from human genome
VRGYLARRRIRLWHRGAMVIQATWRGYRVRRNLAHLCRAT

SEQ ID NO: 32410 - protein, 40 aa, Artificial Sequence
  Quasi-synthetic sequence derived from human genome
LQLLLWKNVTLKRRSPWVLAFEIFIPLVLFFILLGLRQKK

SEQ ID NO: 32411 - protein, 40 aa, Artificial Sequence
  Quasi-synthetic sequence derived from human genome
AIRIRILCCLTFLVKVKSKALLKNRLLPPLLHTLFPIVAA

SEQ ID NO: 32412 - protein, 40 aa, Artificial Sequence
  Quasi-synthetic sequence derived from human genome
FLLFMQSIATISLFLNILEIFHLGFKKIKRGLWGKYKLKK

SEQ ID NO: 32413 - protein, 40 aa, Artificial Sequence
  Quasi-synthetic sequence derived from human genome
RKAFAKRQQQLTAMKVLQRNCAAYLKLRNWQWWRLFTKVK

SEQ ID NO: 32414 - protein, 40 aa, Artificial Sequence
  Quasi-synthetic sequence derived from human genome
AKILGVLRVLRLLRTLRPLRVISRAPGLKLVVETLISSLK

SEQ ID NO: 32415 - protein, 40 aa, Artificial Sequence
  Quasi-synthetic sequence derived from human genome
RGYLARQRYQQMRRSLVKFRSLVHAYVSRRRYLKLRAEWR

SEQ ID NO: 32416 - protein, 40 aa, Artificial Sequence
  Quasi-synthetic sequence derived from human genome
RARAWIRLSLEKKLLSQHLKQLLSNQPLTKKLYKRYAFLR

SEQ ID NO: 32417 - protein, 40 aa, Artificial Sequence
  Quasi-synthetic sequence derived from human genome
WVIPWHLNKRYNRKRFFALPYVDHFLRLEREKRARIKARK

SEQ ID NO: 32418 - protein, 40 aa, Artificial Sequence
  Quasi-synthetic sequence derived from human genome
LCCRRRRARLRFMKQKFNIVCLKISGFTTCCCFQILQISR

SEQ ID NO: 32419 - protein, 40 aa, Artificial Sequence
  Quasi-synthetic sequence derived from human genome
RKNYGLMRLGFLRLQALHRSRKLHQQYRLARQRIIQFQAR

SEQ ID NO: 32420 - protein, 40 aa, Artificial Sequence
  Quasi-synthetic sequence derived from human genome
FKIKQFLAKKQKQNRPIPQWIRMKTGNKIRYNSKRRHWKR

SEQ ID NO: 32421 - protein, 40 aa, Artificial Sequence
  Quasi-synthetic sequence derived from human genome
HLLKIKNTFCLWKRLIKLKDNHCEQLRVKIRKLKNKASVL

SEQ ID NO: 32422 - protein, 40 aa, Artificial Sequence
  Quasi-synthetic sequence derived from human genome
IRHMIRKNKYRPDLRMAAIRRASAILRSQKPVMVKRKRTR

SEQ ID NO: 32423 - protein, 40 aa, Artificial Sequence
  Quasi-synthetic sequence derived from human genome
RNVKFPLPIYKSKKGWTAYKLQLFKMFPIILAILVSWLLC

SEQ ID NO: 32424 - protein, 40 aa, Artificial Sequence
  Quasi-synthetic sequence derived from human genome
KVKYVKLARSLRTYGVSFFLVKEKMKGKNKLVPRLLGITK

SEQ ID NO: 32425 - protein, 40 aa, Artificial Sequence
  Quasi-synthetic sequence derived from human genome
KVRYVKLARSLKTYGVSFFLVKEKMKGKNKLVPRLLGITK

SEQ ID NO: 32426 - protein, 40 aa, Artificial Sequence
  Quasi-synthetic sequence derived from human genome
KINLAVANTGILVFQGFTKINAFNWAKVRKLSFKRKRFLI

SEQ ID NO: 32427 - protein, 40 aa, Artificial Sequence
  Quasi-synthetic sequence derived from human genome
KRYPQPRGQKKKKVVKYGMGGMIIVLLICIVWFPLLFMSL

SEQ ID NO: 32428 - protein, 40 aa, Artificial Sequence
  Quasi-synthetic sequence derived from human genome
ILFLTCISVHRCLGVLRPLRSLRWGRARYARRVAGAVWVL

SEQ ID NO: 32429 - protein, 40 aa, Artificial Sequence
  Quasi-synthetic sequence derived from human genome
LATLIQKIYRGWKCRTHFLLMKKSQIVIAAWYRRYAQQKR

SEQ ID NO: 32430 - protein, 40 aa, Artificial Sequence
  Quasi-synthetic sequence derived from human genome
LMTQMRMGKKKRAMKGKKPSFMVIRFPGRRGYGRLRPRAR

SEQ ID NO: 32431 - protein, 40 aa, Artificial Sequence
  Quasi-synthetic sequence derived from human genome
VLLTLLLIAFIFLIIKSYRKYRRERLPISPGPLLRWVPLL

SEQ ID NO: 32432 - protein, 40 aa, Artificial Sequence
  Quasi-synthetic sequence derived from human genome
RLQHGNMRKNMRVLSRISKFRRLRQLLRRRKKTRQGRRGG

SEQ ID NO: 32433 - protein, 40 aa, Artificial Sequence
  Quasi-synthetic sequence derived from human genome
VLQNLRTAMRRQMRRHASRRGPSRRRLGRLWNRLFHRPRA

SEQ ID NO: 32434 - protein, 40 aa, Artificial Sequence
  Quasi-synthetic sequence derived from human genome
RKAFAKRQQQLTAMKVIQRNCAAYLKLRNWQWWRLFTKVK

SEQ ID NO: 32435 - protein, 40 aa, Artificial Sequence
  Quasi-synthetic sequence derived from human genome
KLYWWRFLSMWGMFSVITSYILFRATRKPLSGRTPRLVYK

SEQ ID NO: 32436 - protein, 40 aa, Artificial Sequence
  Quasi-synthetic sequence derived from human genome
FVALLWKRLLIARRSRKGFFAQIVLPAVFVCIALVFSLIV

SEQ ID NO: 32437 - protein, 40 aa, Artificial Sequence
  Quasi-synthetic sequence derived from human genome
YWLSLLYKRLIGPKVLAVHVAGLQRKPRPGRVIRDKLRIY

SEQ ID NO: 32438 - protein, 40 aa, Artificial Sequence
  Quasi-synthetic sequence derived from human genome
MAKLWFKFQRYFRRKPVRFFTFLALYLTAGSLVFLHSGFV

SEQ ID NO: 32439 - protein, 40 aa, Artificial Sequence
  Quasi-synthetic sequence derived from human genome
LLVLYKKGVYLSHTGGKMLFWVLGLLILCGFLWTRKGKLK

SEQ ID NO: 32440 - protein, 40 aa, Artificial Sequence
  Quasi-synthetic sequence derived from human genome
RLLRLIILIRIFHLLHQKRQLEKLMRRLVSENKRRYTRDG

SEQ ID NO: 32441 - protein, 40 aa, Artificial Sequence
  Quasi-synthetic sequence derived from human genome
QGRQVTGRIRASLVLILKTIRRRLPFSKWRLAFRFAGPHA

SEQ ID NO: 32442 - protein, 40 aa, Artificial Sequence
  Quasi-synthetic sequence derived from human genome
AKGEAIFNFILVVMFWLIFLLIILSYIKIGKNLLRISKRR

SEQ ID NO: 32443 - protein, 40 aa, Artificial Sequence
  Quasi-synthetic sequence derived from human genome
RFSFTLPYPVKIKVRFSFFLQIYLIMIFLGLYINFRHLYK

SEQ ID NO: 32444 - protein, 40 aa, Artificial Sequence
  Quasi-synthetic sequence derived from human genome
RRLKAHNLCRQIRAACVIQSYWRMRQDRVRFLNLKKTIIK

SEQ ID NO: 32445 - protein, 40 aa, Artificial Sequence
  Quasi-synthetic sequence derived from human genome
KSSWVKRHRSSFRNRFPLLKVLILQRNKLSDTPKGLWKLK

SEQ ID NO: 32446 - protein, 40 aa, Artificial Sequence
  Quasi-synthetic sequence derived from human genome
LSLIIGLRKTFWFFFQRHKLKGTSFLLGGVVIVLLRWPLL

SEQ ID NO: 32447 - protein, 40 aa, Artificial Sequence
  Quasi-synthetic sequence derived from human genome
YIKIYIVLRRRRKRVNTKRSSRAFRAHLRAPLKEAARRAQ

SEQ ID NO: 32448 - protein, 40 aa, Artificial Sequence
  Quasi-synthetic sequence derived from human genome
GKFIRIFQLSNNIRSVVLRHCKKRQSHLRLTLKNNVFLFI

SEQ ID NO: 32449 - protein, 40 aa, Artificial Sequence
  Quasi-synthetic sequence derived from human genome
KRCIVLVTELMTSGTLKTYLKRFKVMKPKVLRSWCRQILK

SEQ ID NO: 32450 - protein, 40 aa, Artificial Sequence
  Quasi-synthetic sequence derived from human genome
KVAARMVWRLLHGQVLTRRERRRLLRTCVDFFRLVPFMVF

SEQ ID NO: 32451 - protein, 40 aa, Artificial Sequence
  Quasi-synthetic sequence derived from human genome
IPVMLLGVTLLKKKYPLAKYLCVLLIVAGVALFMYKPKKV

SEQ ID NO: 32452 - protein, 40 aa, Artificial Sequence
  Quasi-synthetic sequence derived from human genome
WALSLLLGVARSLWMLLKLRQRLRSPTAPFTSPLPRGKRR

SEQ ID NO: 32453 - protein, 40 aa, Artificial Sequence
  Quasi-synthetic sequence derived from human genome
FYTLVIPLLNPFIYSLRNKEVINIMKKIMKKRKFCHILKQ

SEQ ID NO: 32454 - protein, 40 aa, Artificial Sequence
  Quasi-synthetic sequence derived from human genome
RFLFAKLFSHITSARKARKYEIPHFRLKKVENIKIWLSLR

SEQ ID NO: 32455 - protein, 40 aa, Artificial Sequence
  Quasi-synthetic sequence derived from human genome
YLLIIRSLRQGLRVEKRLKTKAVRMIAIVLAIFLVCFVPY

SEQ ID NO: 32456 - protein, 40 aa, Artificial Sequence
  Quasi-synthetic sequence derived from human genome
MLIQAAIRSWLTRKHIQRLHAAATVIKRAWQKWRIRMACL

SEQ ID NO: 32457 - protein, 40 aa, Artificial Sequence
  Quasi-synthetic sequence derived from human genome
LRRVLVLMASKHAFLALCALRFKRKIIGLKDEFYNRYIMK

SEQ ID NO: 32458 - protein, 40 aa, Artificial Sequence
  Quasi-synthetic sequence derived from human genome
KVIKYIWRIGTDGRTVRRTMNIVPRTKVKTIKMFLILNLL

SEQ ID NO: 32459 - protein, 40 aa, Artificial Sequence
  Quasi-synthetic sequence derived from human genome
CTQIWVKMYGYFAGLCRRLQKFWRVTVKGFFVKKKEKKIP

SEQ ID NO: 32460 - protein, 40 aa, Artificial Sequence
  Quasi-synthetic sequence derived from human genome
LLKLRRNIVKLSLYRHFTNTLILAVAASIVFIIWTTMKFR

SEQ ID NO: 32461 - protein, 40 aa, Artificial Sequence
  Quasi-synthetic sequence derived from human genome
VSTWLAIILLIFISLFPEILLIVLKNVRRRSARRNLSCRR

SEQ ID NO: 32462 - protein, 40 aa, Artificial Sequence
  Quasi-synthetic sequence derived from human genome
FYGFKNIFITMFATFFFFKLLIKVFLALLTHFYIVKGNRK

SEQ ID NO: 32463 - protein, 40 aa, Artificial Sequence
  Quasi-synthetic sequence derived from human genome
ILRVIRLVRVFRIFKLSRHSKGLQILGQTLKASMRELGLL

SEQ ID NO: 32464 - protein, 40 aa, Artificial Sequence
  Quasi-synthetic sequence derived from human genome
ILRVIRLVRVFRIFKLSRHSKGLQILGKTLQASMRELGLL

SEQ ID NO: 32465 - protein, 40 aa, Artificial Sequence
  Quasi-synthetic sequence derived from human genome
RLVVYKIVYMFLFLLCLTLFQVYYSLWRKLLKAFWWLVVA

SEQ ID NO: 32466 - protein, 40 aa, Artificial Sequence
  Quasi-synthetic sequence derived from human genome
LRTFRLLRVLKLVRFLPALRRQLVVLVKTMDNVATFCTLL

SEQ ID NO: 32467 - protein, 40 aa, Artificial Sequence
  Quasi-synthetic sequence derived from human genome
LGVCSSGLLVYKDKLRINRFPWPKVLKISYKRSSFFIKIR

SEQ ID NO: 32468 - protein, 40 aa, Artificial Sequence
  Quasi-synthetic sequence derived from human genome
KLKFWTHCVLATLIMFTIFSFFAEQLIALKRKIFPRRRIH

SEQ ID NO: 32469 - protein, 40 aa, Artificial Sequence
  Quasi-synthetic sequence derived from human genome
FLKITSTRLLCSRLCQQLRSKRKFFGTVPISRLHRRVVIT

SEQ ID NO: 32470 - protein, 40 aa, Artificial Sequence
  Quasi-synthetic sequence derived from human genome
KWRHHRRLLTPAFHFNILKPYIKIFSKSANIMHAKWQRLA

SEQ ID NO: 32471 - protein, 40 aa, Artificial Sequence
  Quasi-synthetic sequence derived from human genome
TPIKHLRKSLKIIYLNSIQQLEIRNMSWPRLIRKLRCYLK

SEQ ID NO: 32472 - protein, 40 aa, Artificial Sequence
  Quasi-synthetic sequence derived from human genome
RTAFKKTVNIPVLKVRKEIVSKLMRSLKRAALQRPGIRRV

SEQ ID NO: 32473 - protein, 40 aa, Artificial Sequence
  Quasi-synthetic sequence derived from human genome
RMWRIRRRYCQVLNAVRIIQAYWRCRSCASRGFIKGQYRV

SEQ ID NO: 32474 - protein, 40 aa, Artificial Sequence
  Quasi-synthetic sequence derived from human genome
WALLLWKMRLFQRQWANSFFQGLQQRMLQRSLRWWHLRAL

SEQ ID NO: 32475 - protein, 40 aa, Artificial Sequence
  Quasi-synthetic sequence derived from human genome
MWICQICRPRKKGRKLLQKKAAQIKRRYTNPIGRPKNRLK

SEQ ID NO: 32476 - protein, 40 aa, Artificial Sequence
  Quasi-synthetic sequence derived from human genome
KHVRGWMARRHFQRLRDAAIVIQCAFRMLKARRELKALRI

SEQ ID NO: 32477 - protein, 40 aa, Artificial Sequence
  Quasi-synthetic sequence derived from human genome
RMRYKRTKAALTIIRYYRRYKVKSYIHEVARRFHGVKTMR

SEQ ID NO: 32478 - protein, 40 aa, Artificial Sequence
  Quasi-synthetic sequence derived from human genome
MKPPISRAKMILITKAAIKAIKLYKHVVQIVEKFIKKCKP

SEQ ID NO: 32479 - protein, 40 aa, Artificial Sequence
  Quasi-synthetic sequence derived from human genome
GVIAGLLMFIIILLGVMLTIKRRRNAYSYSYYLKLAKKQK

SEQ ID NO: 32480 - protein, 40 aa, Artificial Sequence
  Quasi-synthetic sequence derived from human genome
FCKAIRFSYPSIHPFILIWGNKKLKQTFLSVLRQVRYWVK

SEQ ID NO: 32481 - protein, 40 aa, Artificial Sequence
  Quasi-synthetic sequence derived from human genome
LIWKNYKKYIIIAFILIILIIFLVLFIYTLPGAISRRIVV

SEQ ID NO: 32482 - protein, 40 aa, Artificial Sequence
  Quasi-synthetic sequence derived from human genome
KKLISLAYTLLTPLLNPLIYSLRNSEMKRTLIKLWRRKVI

SEQ ID NO: 32483 - protein, 40 aa, Artificial Sequence
  Quasi-synthetic sequence derived from human genome
LQRLLLVHGRWSYIRMCKFLRYFFYKNFAFTLVHFWYSFF

SEQ ID NO: 32484 - protein, 40 aa, Artificial Sequence
  Quasi-synthetic sequence derived from human genome
FGAMFAKTWRVHAIFKNVKMKKKIIKDQKLLVIVGGMLLI

SEQ ID NO: 32485 - protein, 40 aa, Artificial Sequence
  Quasi-synthetic sequence derived from human genome
CLFCLKLFKTAIPYMNHCWRHSRRRVLQCSKCRLQFLTLK

SEQ ID NO: 32486 - protein, 40 aa, Artificial Sequence
  Quasi-synthetic sequence derived from human genome
KLVSPKWKNFKGLKLQWRDKIRLNNAIWRAWYMQYLEKRK

SEQ ID NO: 32487 - protein, 40 aa, Artificial Sequence
  Quasi-synthetic sequence derived from human genome
RGARVITPEDLLFLMRKDKKKLRRLLKYMFIRDYKSKIVK

SEQ ID NO: 32488 - protein, 40 aa, Artificial Sequence
  Quasi-synthetic sequence derived from human genome
LLVICLCYLLIVVKVRSAGRRVWAPSCQRRRRSERRVTRM

SEQ ID NO: 32489 - protein, 40 aa, Artificial Sequence
  Quasi-synthetic sequence derived from human genome
RRPRRRASRAFCPRPCALPGRPGLTLLCRPRCRRQPRLRL

SEQ ID NO: 32490 - protein, 40 aa, Artificial Sequence
  Quasi-synthetic sequence derived from human genome
RRMIDYRHFVPQMPFVPAVAKSIPRKRISLKRPKKCFRNL

SEQ ID NO: 32491 - protein, 40 aa, Artificial Sequence
  Quasi-synthetic sequence derived from human genome
FYIRSYILNKDLLRKALILMNSKHTHLILCVLRFMRRMIC

SEQ ID NO: 32492 - protein, 40 aa, Artificial Sequence
  Quasi-synthetic sequence derived from human genome
FILRRKPVEQKKIFTIQGCYPVIRCLLRRRGWVEKKMVHR

SEQ ID NO: 32493 - protein, 40 aa, Artificial Sequence
  Quasi-synthetic sequence derived from human genome
RMVWRLLHGQVLTRRERRRLLRTCVDFFRLVPFMVFLIVP

SEQ ID NO: 32494 - protein, 40 aa, Artificial Sequence
  Quasi-synthetic sequence derived from human genome
IMSVFPVVMYFWKRFCFWKATRSYLQYRGKKFKDRKSPPK

SEQ ID NO: 32495 - protein, 40 aa, Artificial Sequence
  Quasi-synthetic sequence derived from human genome
LLSLKKNKIHSLPDKVFIKYTKLKKIFLQHNCIRHISRKA

SEQ ID NO: 32496 - protein, 40 aa, Artificial Sequence
  Quasi-synthetic sequence derived from human genome
FVQLSGRPHLPGKKKIRWDPVRRRFIQSCPIIRIPNRFLR

SEQ ID NO: 32497 - protein, 40 aa, Artificial Sequence
  Quasi-synthetic sequence derived from human genome
RLQSWVRMWCVRQRYCRLLNAVRIIQVYWRWHSCHSRVFI

SEQ ID NO: 32498 - protein, 40 aa, Artificial Sequence
  Quasi-synthetic sequence derived from human genome
VQLWLVLRYRHKRLSYQSVFLFLCLFWASLRTVLFSFYFK

SEQ ID NO: 32499 - protein, 40 aa, Artificial Sequence
  Quasi-synthetic sequence derived from human genome
FVAGLLLGKGCRYFRYILKQDHQILGKKIKRMKRSVKKYS

SEQ ID NO: 32500 - protein, 40 aa, Artificial Sequence
  Quasi-synthetic sequence derived from human genome
MARGGRGRRLGLALGLLLALVLAPRVLRAKPTVRKERVVR

SEQ ID NO: 32501 - protein, 40 aa, Artificial Sequence
  Quasi-synthetic sequence derived from human genome
LPLLVMIICYTGIIKILLRRPNEKKSKAVRLIFVIMIIFF

SEQ ID NO: 32502 - protein, 40 aa, Artificial Sequence
  Quasi-synthetic sequence derived from human genome
RCFLLTFYLWFLFFSRFLLMLFLPLLTSVVTFLPPLRARR

SEQ ID NO: 32503 - protein, 40 aa, Artificial Sequence
  Quasi-synthetic sequence derived from human genome
YLRRFREMKPRVLQRWSRQILRGLHFLHSRVPPILHRDLK

SEQ ID NO: 32504 - protein, 40 aa, Artificial Sequence
  Quasi-synthetic sequence derived from human genome
VLFWVILVLVVVVGSSAFLLCHRRACRKRIRQKLHLCYPV

SEQ ID NO: 32505 - protein, 40 aa, Artificial Sequence
  Quasi-synthetic sequence derived from human genome
RRWKKKQLRRPSLLLLGCCSFGIMAPSLWKGLVGIGLFAL

SEQ ID NO: 32506 - protein, 40 aa, Artificial Sequence
  Quasi-synthetic sequence derived from human genome
LRFYPASPRRLHRASTPGPAWGWLLRRRRWAALLVLGLLV

SEQ ID NO: 32507 - protein, 40 aa, Artificial Sequence
  Quasi-synthetic sequence derived from human genome
LKLHFTCQRILFLKPSCMLEVITWPIQAFVKRKVIIFLKK

SEQ ID NO: 32508 - protein, 40 aa, Artificial Sequence
  Quasi-synthetic sequence derived from human genome
NKDLRRNKAALLFWHILLLGPIVRCLHTIRNYHKWLKNLK

SEQ ID NO: 32509 - protein, 40 aa, Artificial Sequence
  Quasi-synthetic sequence derived from human genome
RARRKTARMLMIVLLVFAICYLPISILNVLKRVFGMFAHT

SEQ ID NO: 32510 - protein, 40 aa, Artificial Sequence
  Quasi-synthetic sequence derived from human genome
QTRRQRKLHFVVGGFAYLLPKTAVVLRCPARRVRKPLITW

SEQ ID NO: 32511 - protein, 40 aa, Artificial Sequence
  Quasi-synthetic sequence derived from human genome
LRLRKNTVKFSLYRHFKNTLIFAVLASIVFMGWTTKTFRI

SEQ ID NO: 32512 - protein, 40 aa, Artificial Sequence
  Quasi-synthetic sequence derived from human genome
LLRSARRRRRGRTDGRRFLLRRAVPGHLGLARARVERAWL

SEQ ID NO: 32513 - protein, 40 aa, Artificial Sequence
  Quasi-synthetic sequence derived from human genome
LLVRTDKRSDSLIRKKFRMMKIPKPILFGLNIAMKKQTKI

SEQ ID NO: 32514 - protein, 40 aa, Artificial Sequence
  Quasi-synthetic sequence derived from human genome
FKRAFVRILGCQCRGRGRRRRRRRRRLGGCAYTYRPWTRG

SEQ ID NO: 32515 - protein, 40 aa, Artificial Sequence
  Quasi-synthetic sequence derived from human genome
SALTRSFYVILGFCGLTALYFLIRAFRLKKPQRRRYGLLA

SEQ ID NO: 32516 - protein, 40 aa, Artificial Sequence
  Quasi-synthetic sequence derived from human genome
RVALARVSSVKLISKAKIRTVKMTFIIVLAFIVCWTPFFF

SEQ ID NO: 32517 - protein, 40 aa, Artificial Sequence
  Quasi-synthetic sequence derived from human genome
CAPLFALLSRGRRRRMHVLRRRWDLGSLCRALLTRGLAAL

SEQ ID NO: 32518 - protein, 40 aa, Artificial Sequence
  Quasi-synthetic sequence derived from human genome
KFHIRRFIFLFFILVIGIYPSGHSLILILGNPKLKQNAKK

SEQ ID NO: 32519 - protein, 40 aa, Artificial Sequence
  Quasi-synthetic sequence derived from human genome
FGLLLKKIMAILIKRFHHTRRNWKGLIAQVILPIVFVTTA

SEQ ID NO: 32520 - protein, 40 aa, Artificial Sequence
  Quasi-synthetic sequence derived from human genome
KNWKIILCLFIIPLVGCGFVSFRKKPVDKHKKLLWYYVAF

SEQ ID NO: 32521 - protein, 40 aa, Artificial Sequence
  Quasi-synthetic sequence derived from human genome
SRRRQGWLKEIRKLQKSTHLLIRKLPFSRLAREICVKFTR

SEQ ID NO: 32522 - protein, 40 aa, Artificial Sequence
  Quasi-synthetic sequence derived from human genome
KRKKKAWKRMVTKVCFVGDGFTRKPPKYERFIRPMGLRFK

SEQ ID NO: 32523 - protein, 40 aa, Artificial Sequence
  Quasi-synthetic sequence derived from human genome
NLKRRYSFRLHIGRNIARPWKLIYYRAKKMFDVNNYKGRY

SEQ ID NO: 32524 - protein, 40 aa, Artificial Sequence
  Quasi-synthetic sequence derived from human genome
FVYKLFSLQDLLLLVRCSVQRIETRPRSKKRKKIRRQFPV

SEQ ID NO: 32525 - protein, 40 aa, Artificial Sequence
  Quasi-synthetic sequence derived from human genome
RWKRWFKFRKRKGEKRPRPNHKAVARRAKLKFSTSEKLHW

SEQ ID NO: 32526 - protein, 40 aa, Artificial Sequence
  Quasi-synthetic sequence derived from human genome
LLLRKILLRKFCQMRKRRLREQFWRPASSGSGCQQIRCLM

SEQ ID NO: 32527 - protein, 40 aa, Artificial Sequence
  Quasi-synthetic sequence derived from human genome
FRWMRLRIRRMADAWIQAIKSLAEKQNLEKRKRKKVLVHL

SEQ ID NO: 32528 - protein, 40 aa, Artificial Sequence
  Quasi-synthetic sequence derived from human genome
LGRLLIYKQGRKLFPIKLKNKKGLVSLIDLLVLFTQLIYY

SEQ ID NO: 32529 - protein, 40 aa, Artificial Sequence
  Quasi-synthetic sequence derived from human genome
LRIQFFLQMAVYRRRFVQQKRAAITLQHYFRTWQTRKQFL

SEQ ID NO: 32530 - protein, 40 aa, Artificial Sequence
  Quasi-synthetic sequence derived from human genome
LLLLPLLLLKLHLWPQLRWLPADLAFAVRALCCKRALRAR

SEQ ID NO: 32531 - protein, 40 aa, Artificial Sequence
  Quasi-synthetic sequence derived from human genome
KARRELKRLKEEARRKHAVAVIWAYWLGLKVRREYRKFFR

SEQ ID NO: 32532 - protein, 40 aa, Artificial Sequence
  Quasi-synthetic sequence derived from human genome
KALMASMARRASRGPIAFWARRASRTRLAAWARRALLSLR

SEQ ID NO: 32533 - protein, 40 aa, Artificial Sequence
  Quasi-synthetic sequence derived from human genome
VFLLLVIKSSPSNYVRRELLRRTWGRERKVRGLQLRLLFL

SEQ ID NO: 32534 - protein, 40 aa, Artificial Sequence
  Quasi-synthetic sequence derived from human genome
RKLKFFFMNPCEKFWARGRKPWKLAIQILKIAMVTIQYLQ

SEQ ID NO: 32535 - protein, 40 aa, Artificial Sequence
  Quasi-synthetic sequence derived from human genome
FTIKRFLAKKQKQNRPIPQWIQMKPGSKIRYNSKRRHWRR

SEQ ID NO: 32536 - protein, 40 aa, Artificial Sequence
  Quasi-synthetic sequence derived from human genome
MLGKDMVRFVVRKTVQRSVAKGSRRCKKRMFKFHQMKHIF

SEQ ID NO: 32537 - protein, 40 aa, Artificial Sequence
  Quasi-synthetic sequence derived from human genome
LVGAGVVLMLIILVALLMLVFRSKREVKRQKYRLSQLYKW

SEQ ID NO: 32538 - protein, 40 aa, Artificial Sequence
  Quasi-synthetic sequence derived from human genome
YFRIQEVLKHARHFRGRKNRCYRLAVRTVIRAFVKCTKAR

SEQ ID NO: 32539 - protein, 40 aa, Artificial Sequence
  Quasi-synthetic sequence derived from human genome
LLTFFFFPICVVFAWVADRRLLFYKYVYKRYRAGKQRGMI

SEQ ID NO: 32540 - protein, 40 aa, Artificial Sequence
  Quasi-synthetic sequence derived from human genome
KILRVLRVLRPLRAINRAKGLKHVVQCMFVAISTIGNIVL

SEQ ID NO: 32541 - protein, 40 aa, Artificial Sequence
  Quasi-synthetic sequence derived from human genome
LHILEHRVRVLSVARPGLWLYTHPLIKLLFLPRRSRCKFF

SEQ ID NO: 32542 - protein, 40 aa, Artificial Sequence
  Quasi-synthetic sequence derived from human genome
RHRGKRVVFLKQLASGLLLVTGPLVLNRVPLRRTHQKFVI

SEQ ID NO: 32543 - protein, 40 aa, Artificial Sequence
  Quasi-synthetic sequence derived from human genome
IILLPVHLLITIYSALIFIPWYFLTNAKKKNAMAKRIKAK

SEQ ID NO: 32544 - protein, 40 aa, Artificial Sequence
  Quasi-synthetic sequence derived from human genome
PGPKAALAVIRGGATRAAGVFYPWRFRLLCLLRRWLPRPR

SEQ ID NO: 32545 - protein, 40 aa, Artificial Sequence
  Quasi-synthetic sequence derived from human genome
LHKDSQQKTVKKKIKPTLPLRIFINVSRFFCVQLKKMVRL

SEQ ID NO: 32546 - protein, 40 aa, Artificial Sequence
  Quasi-synthetic sequence derived from human genome
RRRHWAVKMVTCFIIGLLFPVFSVCYLIAPKSPLGLFIRK

SEQ ID NO: 32547 - protein, 40 aa, Artificial Sequence
  Quasi-synthetic sequence derived from human genome
RNKLKYLAFLRKRMNTNPSRGPYHFRAPSRIFWRTVRGML

SEQ ID NO: 32548 - protein, 40 aa, Artificial Sequence
  Quasi-synthetic sequence derived from human genome
MVGALLLLLVVALGIGLFMRRRHIVRKRTLRRLLQERELV

SEQ ID NO: 32549 - protein, 40 aa, Artificial Sequence
  Quasi-synthetic sequence derived from human genome
LIFSFLIVVLVLYVSWKCFPASLRQLRQCFVTQRRKQKQK

SEQ ID NO: 32550 - protein, 40 aa, Artificial Sequence
  Quasi-synthetic sequence derived from human genome
LRKRRRLLSIIVVLVVTFALCWMPYHLVKTLYMLGSLLHW

SEQ ID NO: 32551 - protein, 40 aa, Artificial Sequence
  Quasi-synthetic sequence derived from human genome
KVLFRKSEKYMKLFLWLLVGVGLLGLGLRHKAYERKLGKV

SEQ ID NO: 32552 - protein, 40 aa, Artificial Sequence
  Quasi-synthetic sequence derived from human genome
THSFAIYHQSLFRILKVFKSLRALRAIRVLRRLSFLTSVQ

SEQ ID NO: 32553 - protein, 40 aa, Artificial Sequence
  Quasi-synthetic sequence derived from human genome
KRRMSVGQQTWALLCKNCLKKWRMKRQTLLEWLFSFLLVL

SEQ ID NO: 32554 - protein, 40 aa, Artificial Sequence
  Quasi-synthetic sequence derived from human genome
KKTFIVLNKGKAIFRFSATSALYILTPFNPLRKIAIKILV

SEQ ID NO: 32555 - protein, 40 aa, Artificial Sequence
  Quasi-synthetic sequence derived from human genome
LLRKRRYHAALAVLKGFRNGAVYGAKIRAPHALVMTFLFR

SEQ ID NO: 32556 - protein, 40 aa, Artificial Sequence
  Quasi-synthetic sequence derived from human genome
IFYVTVLAFTLIVLTGGFTWLCICCCKRQKRTKIRKKTKY

SEQ ID NO: 32557 - protein, 40 aa, Artificial Sequence
  Quasi-synthetic sequence derived from human genome
LARQRGVGQQAMSLAILRVIRLVRVFRIFKLSRHSKGLQI

SEQ ID NO: 32558 - protein, 40 aa, Artificial Sequence
  Quasi-synthetic sequence derived from human genome
VIKKIALREIRMLKQLKHPNLVNLLEVFRRKRRLHLVFEY

SEQ ID NO: 32559 - protein, 40 aa, Artificial Sequence
  Quasi-synthetic sequence derived from human genome
RISITFFRLFRVMRLVKLLSRGEGIRTLLWTFIKSFQALP

SEQ ID NO: 32560 - protein, 40 aa, Artificial Sequence
  Quasi-synthetic sequence derived from human genome
LRMMRIFWVIKLARHFIGLQTLGLTLKRCYREMVMLLVFI

SEQ ID NO: 32561 - protein, 40 aa, Artificial Sequence
  Quasi-synthetic sequence derived from human genome
KFIIGYLFPLLTMSICYLCLIFKVKKRSILISSRHFWTIL

SEQ ID NO: 32562 - protein, 40 aa, Artificial Sequence
  Quasi-synthetic sequence derived from human genome
MRKLVIVRAGCPIRLFAIVRGRPAPKVTWRKVGIDNVVRK

SEQ ID NO: 32563 - protein, 40 aa, Artificial Sequence
  Quasi-synthetic sequence derived from human genome
AFSQLRLTPGLRKVLFATALGTVALALAAHQLKRRRRRKK

SEQ ID NO: 32564 - protein, 40 aa, Artificial Sequence
  Quasi-synthetic sequence derived from human genome
TVMRLRTKMPWKTCWRYLTSGGFFLLILMIFSKLLKHSVI

SEQ ID NO: 32565 - protein, 40 aa, Artificial Sequence
  Quasi-synthetic sequence derived from human genome
LRVMRLMRIFRILKLARHSTGLRAFGFTLRQCYQQVGCLL

SEQ ID NO: 32566 - protein, 40 aa, Artificial Sequence
  Quasi-synthetic sequence derived from human genome
FGGFKKFYFHQHLCILKAKLGRPVTWNRQLRHFQGRKKAL

SEQ ID NO: 32567 - protein, 40 aa, Artificial Sequence
  Quasi-synthetic sequence derived from human genome
FVIYSSVVSFYLPFGVTVLVYARIYVVLKQRRRKRILTRQ

SEQ ID NO: 32568 - protein, 40 aa, Artificial Sequence
  Quasi-synthetic sequence derived from human genome
LRFKRTHIKMKKQPKGYGLRCHRAIITICRLIGIKDMYAK

SEQ ID NO: 32569 - protein, 40 aa, Artificial Sequence
  Quasi-synthetic sequence derived from human genome
VKRIRVLVIRKLVRSVGRLKSKKGTEDALLKNQRRAQRLL

SEQ ID NO: 32570 - protein, 40 aa, Artificial Sequence
  Quasi-synthetic sequence derived from human genome
LFHRLCKLLFFRIRPIFVFDGDAPLLKKQTLVKRRQRKDL

SEQ ID NO: 32571 - protein, 40 aa, Artificial Sequence
  Quasi-synthetic sequence derived from human genome
RWIVGKVIGTKMQKTAKVRVTRLVLDPYLLKYFNKRKTYF

SEQ ID NO: 32572 - protein, 40 aa, Artificial Sequence
  Quasi-synthetic sequence derived from human genome
LVSLKWKRYGRPYFCMLGAIYLLYIICFTMCCIYRPLKPR

SEQ ID NO: 32573 - protein, 40 aa, Artificial Sequence
  Quasi-synthetic sequence derived from human genome
SIVSYLFAKSNTVYNPVIYVFMIRKFRRSLLQLLCLRLLR

SEQ ID NO: 32574 - protein, 40 aa, Artificial Sequence
  Quasi-synthetic sequence derived from human genome
HILHISVMGGLIALLLLLLVFTVALYAQRRWQKRRRIPQK

SEQ ID NO: 32575 - protein, 40 aa, Artificial Sequence
  Quasi-synthetic sequence derived from human genome
IHILQIRKLRHRLSNFPRLPGILAPETVLLPFCYKVFRKK

SEQ ID NO: 32576 - protein, 40 aa, Artificial Sequence
  Quasi-synthetic sequence derived from human genome
IVRLVLGFLWPLLTLTICYTFILLRTWSRRATRSTKTLKV

SEQ ID NO: 32577 - protein, 40 aa, Artificial Sequence
  Quasi-synthetic sequence derived from human genome
LVAMAAGGRWVRQQGPRVRRGISRLWLRVLLRLSPMAFRA

SEQ ID NO: 32578 - protein, 40 aa, Artificial Sequence
  Quasi-synthetic sequence derived from human genome
RRLPVRAWADVRRESRLLQLLGRLPLFGLGRLVTRKSWLW

SEQ ID NO: 32579 - protein, 40 aa, Artificial Sequence
  Quasi-synthetic sequence derived from human genome
KKRAPKVLGTTLVVGLLAGVGYFAFMLFRKRLGSMILAFR

SEQ ID NO: 32580 - protein, 40 aa, Artificial Sequence
  Quasi-synthetic sequence derived from human genome
LFSKKFKLWLLNALEGVPALLQISKLKEVTLFVKRLRRKT

SEQ ID NO: 32581 - protein, 40 aa, Artificial Sequence
  Quasi-synthetic sequence derived from human genome
KQKMRQAWKSWLIYVVVRRTKLQMQTTALEFRQRIILRVW

SEQ ID NO: 32582 - protein, 40 aa, Artificial Sequence
  Quasi-synthetic sequence derived from human genome
TQVFKLGLAKSIHHARVLIRQRHIRVRKQVVNIPSFIVRL

SEQ ID NO: 32583 - protein, 40 aa, Artificial Sequence
  Quasi-synthetic sequence derived from human genome
WFICSLCVPRVRKLWSSRRPRTRRNLLLGTACAIYLGFLV

SEQ ID NO: 32584 - protein, 40 aa, Artificial Sequence
  Quasi-synthetic sequence derived from human genome
TRKRALSRLKLKLNKDIVISVGIYNLVQKALKPPPIKLYR

SEQ ID NO: 32585 - protein, 40 aa, Artificial Sequence
  Quasi-synthetic sequence derived from human genome
RLAFQGWLRRGVLLVRAPPACLQVLRDAWRRRALRPPRGF

SEQ ID NO: 32586 - protein, 40 aa, Artificial Sequence
  Quasi-synthetic sequence derived from human genome
NITLMRRILTRNEKNRPRRRFLCHLSRQQLRMAMRIPVLY

SEQ ID NO: 32587 - protein, 40 aa, Artificial Sequence
  Quasi-synthetic sequence derived from human genome
IFPRLARHDRGNYVRLNMKQKHYVRGRALRSRLLRKQAWK

SEQ ID NO: 32588 - protein, 40 aa, Artificial Sequence
  Quasi-synthetic sequence derived from human genome
WTSLTRKGIVRVVFFPFFFRWWLQVTSKVIFFWLLVLYLL

SEQ ID NO: 32589 - protein, 40 aa, Artificial Sequence
  Quasi-synthetic sequence derived from human genome
MTQRALTVLMVVSGAVLVYFVVRTVRMRRRNRKTRRYGVL

SEQ ID NO: 32590 - protein, 40 aa, Artificial Sequence
  Quasi-synthetic sequence derived from human genome
ILGLLLLRWRRPALHRPIKVNLLIPVAYLVFWAFLLVFSF

SEQ ID NO: 32591 - protein, 40 aa, Artificial Sequence
  Quasi-synthetic sequence derived from human genome
MQSWRRRKSLWLALSASWLLLVLLGGFSLLRLALPPRPRP

SEQ ID NO: 32592 - protein, 40 aa, Artificial Sequence
  Quasi-synthetic sequence derived from human genome
KFFLYVCMYVCIREKILLYKTHWMTPIFLKVVINTRRIKH

SEQ ID NO: 32593 - protein, 40 aa, Artificial Sequence
  Quasi-synthetic sequence derived from human genome
VRQRCLIQQKRRRHRATRKIGIAIATFLICFAPYVMTRLA

SEQ ID NO: 32594 - protein, 40 aa, Artificial Sequence
  Quasi-synthetic sequence derived from human genome
QTKSKIKSKYASYLSFIKILLKRGGVKVSTKNLIKLFQII

SEQ ID NO: 32595 - protein, 40 aa, Artificial Sequence
  Quasi-synthetic sequence derived from human genome
FGRRVLCYPLYRHFKLVMKAYRDTIKILQLGKSAVLKCLL

SEQ ID NO: 32596 - protein, 40 aa, Artificial Sequence
  Quasi-synthetic sequence derived from human genome
KKVMSLSYSLLTPLLNLLIYSLRNSEMKRALMKLWRRRVV

SEQ ID NO: 32597 - protein, 40 aa, Artificial Sequence
  Quasi-synthetic sequence derived from human genome
YKTARALRIVRFTKILSLLRLLRLSRLIRYIHQWEEIFHM

SEQ ID NO: 32598 - protein, 40 aa, Artificial Sequence
  Quasi-synthetic sequence derived from human genome
MRSGGRGRPRLRLGERGLMEPLLPPKRRLLPRVRLLPLLL

SEQ ID NO: 32599 - protein, 40 aa, Artificial Sequence
  Quasi-synthetic sequence derived from human genome
RKSALHLFRLGNAMLRIVRSKARPLLHVMRCWSLVAPHLV

SEQ ID NO: 32600 - protein, 40 aa, Artificial Sequence
  Quasi-synthetic sequence derived from human genome
IVIGIAIVSYIPGITIKLLPLRTFRVFRALKAISVVSRLK

SEQ ID NO: 32601 - protein, 40 aa, Artificial Sequence
  Quasi-synthetic sequence derived from human genome
LVRHKDVRRIRSLQRSVQVLRAIVVMYVICWLPYHARRLM

SEQ ID NO: 32602 - protein, 40 aa, Artificial Sequence
  Quasi-synthetic sequence derived from human genome
ALRRFQGLLLDRRGRLHGQVLRLREVARRLERLRRRSLVA

SEQ ID NO: 32603 - protein, 40 aa, Artificial Sequence
  Quasi-synthetic sequence derived from human genome
KLHWWRFLVIWILFSAVTAFVTFRATRKPLVQTTPRLVYK

SEQ ID NO: 32604 - protein, 40 aa, Artificial Sequence
  Quasi-synthetic sequence derived from human genome
AVLLLKKLKAWNDIKKVYASQRMRAGKGKMRNRRRIQRRG

SEQ ID NO: 32605 - protein, 40 aa, Artificial Sequence
  Quasi-synthetic sequence derived from human genome
RHAMMMKSWKIAIESLGFKRFKYSKFSHMHLMAFRKISLK

SEQ ID NO: 32606 - protein, 40 aa, Artificial Sequence
  Quasi-synthetic sequence derived from human genome
ARFLLKRGLRNKRIGHFLFWFLRSEIAQSRHYQQRFAVIL

SEQ ID NO: 32607 - protein, 40 aa, Artificial Sequence
  Quasi-synthetic sequence derived from human genome
RSGKKKMSKLSRSARAGVIFPVGRLMRYLKKGTFKYRISV

SEQ ID NO: 32608 - protein, 40 aa, Artificial Sequence
  Quasi-synthetic sequence derived from human genome
GKRLNIRKVIPYIASQFRKDKIWLRRTKPSKRQYQICLAI

SEQ ID NO: 32609 - protein, 40 aa, Artificial Sequence
  Quasi-synthetic sequence derived from human genome
KYFMKLVNLYKGAVLYLLRGRKTFLIPVLFNNYITAALKL

SEQ ID NO: 32610 - protein, 40 aa, Artificial Sequence
  Quasi-synthetic sequence derived from human genome
ARKFASIARNQVRKKRQMAARERKVTRTIFAILLAFILTW

SEQ ID NO: 32611 - protein, 40 aa, Artificial Sequence
  Quasi-synthetic sequence derived from human genome
IMSLLAIAVDRYLRVKLTVRYKRVTTHRRIWLALGLCWLV

SEQ ID NO: 32612 - protein, 40 aa, Artificial Sequence
  Quasi-synthetic sequence derived from human genome
FRTHHTGLLSVLAMFFLLVLILSSVFLFRLFKRRQGRIFP

SEQ ID NO: 32613 - protein, 40 aa, Artificial Sequence
  Quasi-synthetic sequence derived from human genome
FRRHIRQHSALTRLRLRNVFRRFLRDFQPGRLSQQMVMVK

SEQ ID NO: 32614 - protein, 40 aa, Artificial Sequence
  Quasi-synthetic sequence derived from human genome
MRKHLSWWWLATVCMLLFSHLSAVQTRGIKHRIKWNRKAL

SEQ ID NO: 32615 - protein, 40 aa, Artificial Sequence
  Quasi-synthetic sequence derived from human genome
VGQTIPVFAFLGAMVVLAFFVVQINKAKSRPKRRKPRVKR

SEQ ID NO: 32616 - protein, 40 aa, Artificial Sequence
  Quasi-synthetic sequence derived from human genome
RGLLMAHSQRLLFRIGYSLYTRTWLGYLFYRQQLRRARNR

SEQ ID NO: 32617 - protein, 40 aa, Artificial Sequence
  Quasi-synthetic sequence derived from human genome
FHLLFGLEIRMRRIVFAGVILFRLLGVILFRLLGVILFGR

SEQ ID NO: 32618 - protein, 40 aa, Artificial Sequence
  Quasi-synthetic sequence derived from human genome
LLVVAVFCILWNWNKRKKRQVPYLRVTVMPLLTLPQTRQR

SEQ ID NO: 32619 - protein, 40 aa, Artificial Sequence
  Quasi-synthetic sequence derived from human genome
LFPEFRPGKVLRFLRLFGPGKNVPSVWRSARRKRKKKHRE

SEQ ID NO: 32620 - protein, 40 aa, Artificial Sequence
  Quasi-synthetic sequence derived from human genome
KRKHFRLVLRLVLRGGRELGTFHSRLIKVISKPSQKKQSL

SEQ ID NO: 32621 - protein, 40 aa, Artificial Sequence
  Quasi-synthetic sequence derived from human genome
RKFKFRKMHYDRFVIFLMPHIGCIVMALSKYLMMFQIYCK

SEQ ID NO: 32622 - protein, 40 aa, Artificial Sequence
  Quasi-synthetic sequence derived from human genome
HIPWITAVLPTVIICVMVFCLILWKWKKKKRPRNSYKCGT

SEQ ID NO: 32623 - protein, 40 aa, Artificial Sequence
  Quasi-synthetic sequence derived from human genome
RMRRYRMTHSEKKRLKQCNVITRLRGLQVPVGLPFLLILL

SEQ ID NO: 32624 - protein, 40 aa, Artificial Sequence
  Quasi-synthetic sequence derived from human genome
RHKLKEVRLFLKNYSKTRFGYRIKWRIICGNNSTVIFFHF

SEQ ID NO: 32625 - protein, 40 aa, Artificial Sequence
  Quasi-synthetic sequence derived from human genome
RGWLVRKRFLEQRAKIRLLHFTAAAYYHLNAVRIQRAYKL

SEQ ID NO: 32626 - protein, 40 aa, Artificial Sequence
  Quasi-synthetic sequence derived from human genome
MASWLRRKLRGKRRPVIAFCLLMILSAMAVTRFPPQRPSA

SEQ ID NO: 32627 - protein, 40 aa, Artificial Sequence
  Quasi-synthetic sequence derived from human genome
RGYLARRRIRLWHRGAMVIQATWRGYRVRRNLAHLCRATT

SEQ ID NO: 32628 - protein, 40 aa, Artificial Sequence
  Quasi-synthetic sequence derived from human genome
LAKKIKIFFALAPVVTVKYTQSPMKKLTTLSRRVVKVLFG

SEQ ID NO: 32629 - protein, 40 aa, Artificial Sequence
  Quasi-synthetic sequence derived from human genome
IVLAKKMLRKALKLLNRIFPYNLISLFLHIHVEKNRHFHY

SEQ ID NO: 32630 - protein, 40 aa, Artificial Sequence
  Quasi-synthetic sequence derived from human genome
WKSWLIYVVVRRTKLQMQTTALEFRQRIILRVWWSTWRQR

SEQ ID NO: 32631 - protein, 40 aa, Artificial Sequence
  Quasi-synthetic sequence derived from human genome
IFLVLLFSQYARNVKFPLPIYKSKKGWTAYKLQLFKMFPI

SEQ ID NO: 32632 - protein, 40 aa, Artificial Sequence
  Quasi-synthetic sequence derived from human genome
LKMVWRINPAHRKLQARLDQMRKFRRQHEQLRAVIVRVLR

SEQ ID NO: 32633 - protein, 40 aa, Artificial Sequence
  Quasi-synthetic sequence derived from human genome
HHTKALSSRRLFVRRGQPFTIILYFRAPVRAFLPALKKVA

SEQ ID NO: 32634 - protein, 40 aa, Artificial Sequence
  Quasi-synthetic sequence derived from human genome
HLFQMPLFLKLFICFIFIRSSPTIVSNKRVSKRKFIPPAF

SEQ ID NO: 32635 - protein, 40 aa, Artificial Sequence
  Quasi-synthetic sequence derived from human genome
QRRKSLRGRERVLSILRGVPHGKGRAIRLGVLKSPLKKLM

SEQ ID NO: 32636 - protein, 40 aa, Artificial Sequence
  Quasi-synthetic sequence derived from human genome
MARRGWRRAPLRRGVGSSPRARRLMRPLWLLLAVGVFDWA

SEQ ID NO: 32637 - protein, 40 aa, Artificial Sequence
  Quasi-synthetic sequence derived from human genome
RVLFYLGPVYLAGYLGLSITWLLLGALLWMWWRRNRRGKL

SEQ ID NO: 32638 - protein, 40 aa, Artificial Sequence
  Quasi-synthetic sequence derived from human genome
KQVKTVRFQTPGRFSWFCKRRRAFWHTPRLPTLPKRVPRA

SEQ ID NO: 32639 - protein, 40 aa, Artificial Sequence
  Quasi-synthetic sequence derived from human genome
VLLLFVLLLVVRRRRREQRLKRLRDAKSLAEMLMSKNTRT

SEQ ID NO: 32640 - protein, 40 aa, Artificial Sequence
  Quasi-synthetic sequence derived from human genome
LLLAKVMRFERFGRRRVIIKKGQKGNSFYFIYLGTVAITK

SEQ ID NO: 32641 - protein, 40 aa, Artificial Sequence
  Quasi-synthetic sequence derived from human genome
VVQFFRILRIFKLIAPKLLQIIDKRMSHQKTFWYGILKGY

SEQ ID NO: 32642 - protein, 40 aa, Artificial Sequence
  Quasi-synthetic sequence derived from human genome
RPGLRRQWKCVQRRCLRHLAHRLRRRHQRCQRRTPLAVAP

SEQ ID NO: 32643 - protein, 40 aa, Artificial Sequence
  Quasi-synthetic sequence derived from human genome
LRAAKWLHFPQLALRRRLGQLSCMSRPALKLRSWPLTVLY

SEQ ID NO: 32644 - protein, 40 aa, Artificial Sequence
  Quasi-synthetic sequence derived from human genome
FPKSFFSSKAKVIYLMRNPRDVLVSGYFFWKNMKFIKKPK

SEQ ID NO: 32645 - protein, 40 aa, Artificial Sequence
  Quasi-synthetic sequence derived from human genome
KLRRAAILRRERQQKAPRHPLADILHRGCPLLRRWLCRRC

SEQ ID NO: 32646 - protein, 40 aa, Artificial Sequence
  Quasi-synthetic sequence derived from human genome
IHLFRKPQRSFFGKLLREFRLVAADRRSWKILLFGVINLI

SEQ ID NO: 32647 - protein, 40 aa, Artificial Sequence
  Quasi-synthetic sequence derived from human genome
LRGRRCHCLPFPKRGMQRWMLPLRRGARLLPLASSKNPRA

SEQ ID NO: 32648 - protein, 40 aa, Artificial Sequence
  Quasi-synthetic sequence derived from human genome
RLLWKKLCQYHFSERQIRKRLILSDKGQLDWKKMYFKLVR

SEQ ID NO: 32649 - protein, 40 aa, Artificial Sequence
  Quasi-synthetic sequence derived from human genome
KTLKYLLLGRWRKKHLTFRILNLPSTLPPHTARAALRQAF

SEQ ID NO: 32650 - protein, 40 aa, Artificial Sequence
  Quasi-synthetic sequence derived from human genome
PGTFFFIIGLWWCTKSILKYICKKQKRTCYLGSKTLFYRL

SEQ ID NO: 32651 - protein, 40 aa, Artificial Sequence
  Quasi-synthetic sequence derived from human genome
CLCYLLIVVKVRAAGVRVGCVRRRSERKVTRMVLVVVLVF

SEQ ID NO: 32652 - protein, 40 aa, Artificial Sequence
  Quasi-synthetic sequence derived from human genome
KSWLIYVVVRRTKLQMQTTALEFRQRIILRVWWSTWRQRL

SEQ ID NO: 32653 - protein, 40 aa, Artificial Sequence
  Quasi-synthetic sequence derived from human genome
RRPRIHFRFPNRPFVPSRCNHRFPFQPFYWPHRYLTYRYF

SEQ ID NO: 32654 - protein, 40 aa, Artificial Sequence
  Quasi-synthetic sequence derived from human genome
RRTRRPRFVLMNKMDDLNLHYRFLNWRRRIREIREVRAFR

SEQ ID NO: 32655 - protein, 40 aa, Artificial Sequence
  Quasi-synthetic sequence derived from human genome
RKMMERRESIFCIQYNIRAFMNVKHWPWMKLYFKIKPLLK

SEQ ID NO: 32656 - protein, 40 aa, Artificial Sequence
  Quasi-synthetic sequence derived from human genome
RLPQKFLFLLFLSGLVTLCFGALFLLPHSSRLKRLFLAPR

SEQ ID NO: 32657 - protein, 40 aa, Artificial Sequence
  Quasi-synthetic sequence derived from human genome
AVTFFSHFFYLSLFFWMLFKALLIIYGILVIFRRMMKSRM

SEQ ID NO: 32658 - protein, 40 aa, Artificial Sequence
  Quasi-synthetic sequence derived from human genome
HSCFAARSGKIPSRFKRSYNYKTIVKKILAKLKRARSKKL

SEQ ID NO: 32659 - protein, 40 aa, Artificial Sequence
  Quasi-synthetic sequence derived from human genome
WRFLRIVCKTARRDLFGLSVLIRVRLELRRHQRAGHTIPR

SEQ ID NO: 32660 - protein, 40 aa, Artificial Sequence
  Quasi-synthetic sequence derived from human genome
AKAKALKAKKAVLKGVHSHKKKKIRTSPTFRRPKTLRLRR

SEQ ID NO: 32661 - protein, 40 aa, Artificial Sequence
  Quasi-synthetic sequence derived from human genome
LKLFRHYYVLIVCYIYFTRIIAFLLKLAVPFQWKWLYQLL

SEQ ID NO: 32662 - protein, 40 aa, Artificial Sequence
  Quasi-synthetic sequence derived from human genome
FLLPFLAVVASYSDIGRRLQARRFRRSRRTGRLVVLIILT

SEQ ID NO: 32663 - protein, 40 aa, Artificial Sequence
  Quasi-synthetic sequence derived from human genome
RHAKIKRAITFIMVVAIVFVICFLPSVVVRIRIFWLLHTS

SEQ ID NO: 32664 - protein, 40 aa, Artificial Sequence
  Quasi-synthetic sequence derived from human genome
FKNLFYRTYMLFKNASGKRRFLLCLLLFTVITYFFVVIGI

SEQ ID NO: 32665 - protein, 40 aa, Artificial Sequence
  Quasi-synthetic sequence derived from human genome
RVIQVWFQNRRSKERRMKQLSALGARRHAFFRSPRRMRPL

SEQ ID NO: 32666 - protein, 40 aa, Artificial Sequence
  Quasi-synthetic sequence derived from human genome
FKNKDHFQFTNLFLCGLLSKAKQKLLRHLVPAAALRRKRK

SEQ ID NO: 32667 - protein, 40 aa, Artificial Sequence
  Quasi-synthetic sequence derived from human genome
LLPALGFKNKTVLKKRCKDCYLVKRRGRWYVYCKTHPRHK

SEQ ID NO: 32668 - protein, 40 aa, Artificial Sequence
  Quasi-synthetic sequence derived from human genome
LFMSYVYLLVPPLMNPIIYSIKTKQIRQRIIKKFQFIKSL

SEQ ID NO: 32669 - protein, 40 aa, Artificial Sequence
  Quasi-synthetic sequence derived from human genome
VIWAVIKPGTSFGISVLRALRLLRIFKVTKYWASLRNLVV

SEQ ID NO: 32670 - protein, 40 aa, Artificial Sequence
  Quasi-synthetic sequence derived from human genome
PRRFSPPRRMLPPPPMWRRSPPRMRRRSRSPRRRSPVRRR

SEQ ID NO: 32671 - protein, 40 aa, Artificial Sequence
  Quasi-synthetic sequence derived from human genome
LLLILRGQTRHQVRKGVAVRARPWRKNLQEVFGKRWLLGL

SEQ ID NO: 32672 - protein, 40 aa, Artificial Sequence
  Quasi-synthetic sequence derived from human genome
VCRPVFPCRRRFCPRPFLVGLVVAICLFYQTLTLRGSRKL

SEQ ID NO: 32673 - protein, 40 aa, Artificial Sequence
  Quasi-synthetic sequence derived from human genome
HVRIRVIKKKKVIMKKRKKLTLTRPTPLVTAGPLVTPTPA

SEQ ID NO: 32674 - protein, 40 aa, Artificial Sequence
  Quasi-synthetic sequence derived from human genome
GIFIYQLCNNRKSFRLRRRDLLLGFNKRAIDKCWKIRHFP

SEQ ID NO: 32675 - protein, 40 aa, Artificial Sequence
  Quasi-synthetic sequence derived from human genome
FLGKTMGKLKILSRGSQTKLLCYMMLFSLFVFFIIYWIIK

SEQ ID NO: 32676 - protein, 40 aa, Artificial Sequence
  Quasi-synthetic sequence derived from human genome
SRVSISVLVPGLLLVFVTSAFTVVGMLVFILRNRKRSKRR

SEQ ID NO: 32677 - protein, 40 aa, Artificial Sequence
  Quasi-synthetic sequence derived from human genome
QKKRVKLAQGLWLMNWFSVLAGIIIFSLGLFLKIELRKRS

SEQ ID NO: 32678 - protein, 40 aa, Artificial Sequence
  Quasi-synthetic sequence derived from human genome
RKKRRRSRLVLYPETSRKYRPRVEHRSRAQRCLLLLVAIV

SEQ ID NO: 32679 - protein, 40 aa, Artificial Sequence
  Quasi-synthetic sequence derived from human genome
LLALLGLVVKRAVERRKALSRRARRLAVRMRALESSQRPR

SEQ ID NO: 32680 - protein, 40 aa, Artificial Sequence
  Quasi-synthetic sequence derived from human genome
RNHKTFMVLNRKRTIYRFSAKHALFIFGPFNSIRSLAIRV

SEQ ID NO: 32681 - protein, 40 aa, Artificial Sequence
  Quasi-synthetic sequence derived from human genome
PLRILSKYHRFISFTLYLIGFCMFVLSLVKKHYRLQFYMF

SEQ ID NO: 32682 - protein, 40 aa, Artificial Sequence
  Quasi-synthetic sequence derived from human genome
LRIARFRFRAFHFLNRFPSVYLRCKMVVCRAYDPSSRCYR

SEQ ID NO: 32683 - protein, 40 aa, Artificial Sequence
  Quasi-synthetic sequence derived from human genome
MMQLYVLKLLKVQTKYLGRQWRKSNMKTMSAIYQKVRHRL

SEQ ID NO: 32684 - protein, 40 aa, Artificial Sequence
  Quasi-synthetic sequence derived from human genome
IVRIRGTRMYQPLTEDEIRIFKRKKRIKRRALLFLSYILT

SEQ ID NO: 32685 - protein, 40 aa, Artificial Sequence
  Quasi-synthetic sequence derived from human genome
LMIKRHRAACLIQAHYRGYKGRQVFLRQKSAALIIQKYIR

SEQ ID NO: 32686 - protein, 40 aa, Artificial Sequence
  Quasi-synthetic sequence derived from human genome
LVFLIPFLHFIIFLFTLRCLEWKFGKKSMRKDPFFRISPR

SEQ ID NO: 32687 - protein, 40 aa, Artificial Sequence
  Quasi-synthetic sequence derived from human genome
KPRMRGLLARRLRNHMAVAFVLSLGVAALYKFRVADQRKK

SEQ ID NO: 32688 - protein, 40 aa, Artificial Sequence
  Quasi-synthetic sequence derived from human genome
LWLWTSFNTAFLALQSLRFGFGFRRGRSFLLRSWHHLMKR

SEQ ID NO: 32689 - protein, 40 aa, Artificial Sequence
  Quasi-synthetic sequence derived from human genome
RFSLAVLYQACCVALLLWLALLLSIQRRLPRERKIKYSKL

SEQ ID NO: 32690 - protein, 40 aa, Artificial Sequence
  Quasi-synthetic sequence derived from human genome
RPKISAFLPARQLWKWSGNPTQRRGMKGKARKLFYKAIVR

SEQ ID NO: 32691 - protein, 40 aa, Artificial Sequence
  Quasi-synthetic sequence derived from human genome
LRRGRPKRRRKPQPHSGSVLALPLRSRKIRKQLRSVVSRM

SEQ ID NO: 32692 - protein, 40 aa, Artificial Sequence
  Quasi-synthetic sequence derived from human genome
RRHYYLLRQFKIFSDFRMNKAFVTWKLNVKRIKTEKSRSF

SEQ ID NO: 32693 - protein, 40 aa, Artificial Sequence
  Quasi-synthetic sequence derived from human genome
VKAIAIVIPCILALCLLVLVYTVFQFKRKGTPRHILYCKR

SEQ ID NO: 32694 - protein, 40 aa, Artificial Sequence
  Quasi-synthetic sequence derived from human genome
RRKHWVVKLLTCMTIGFLFPMLSIAYLISPRSNLGLFIKK

SEQ ID NO: 32695 - protein, 40 aa, Artificial Sequence
  Quasi-synthetic sequence derived from human genome
LAVSHMGVLVFQGTTKINTFNWSKVRKLSFKRKRFLIKLH

SEQ ID NO: 32696 - protein, 40 aa, Artificial Sequence
  Quasi-synthetic sequence derived from human genome
VLLRSGYPLRILLPLRGEWMGRRGLPRNLAPGPPRRRYRK

SEQ ID NO: 32697 - protein, 40 aa, Artificial Sequence
  Quasi-synthetic sequence derived from human genome
RLRFAVFTGAFHALSFLLSFVVLCCTYLKVLKVARFHCKR

SEQ ID NO: 32698 - protein, 40 aa, Artificial Sequence
  Quasi-synthetic sequence derived from human genome
VARLWGRRKCKPQMNYDKLSRALRYYYNKRILHKTKGKRF

SEQ ID NO: 32699 - protein, 40 aa, Artificial Sequence
  Quasi-synthetic sequence derived from human genome
LCGKRFAVKPKRDRHIMLTFSLRPFGCGICNKRFKLKHHL

SEQ ID NO: 32700 - protein, 40 aa, Artificial Sequence
  Quasi-synthetic sequence derived from human genome
LKKLGIKLQVLINLGLVYKVQQHNGIIFQFVAFIKRRQRA

SEQ ID NO: 32701 - protein, 40 aa, Artificial Sequence
  Quasi-synthetic sequence derived from human genome
YRFHKTRSRMTHRTPKVKKSPKVRKKSYLSRLMLSNRLPF

SEQ ID NO: 32702 - protein, 40 aa, Artificial Sequence
  Quasi-synthetic sequence derived from human genome
MNRLRNAKIYVERAVKQKKIFTIQGCYPVIRCLLRRRGWV

SEQ ID NO: 32703 - protein, 40 aa, Artificial Sequence
  Quasi-synthetic sequence derived from human genome
LRLQIIQRERRRKELFRKKNKAAAVIQRAWRSYQLRKHLS

SEQ ID NO: 32704 - protein, 40 aa, Artificial Sequence
  Quasi-synthetic sequence derived from human genome
RGQPNTALLSLVLMAGTFFIAFFLRKFKNSRFFPGRIRRV

SEQ ID NO: 32705 - protein, 40 aa, Artificial Sequence
  Quasi-synthetic sequence derived from human genome
HWSHYQVRDKFKKFDHRYLRKILIRKNLPKSSIVSLYKKL

SEQ ID NO: 32706 - protein, 40 aa, Artificial Sequence
  Quasi-synthetic sequence derived from human genome
QYVYKIGIYGWRKRCLYLFVLLLLIILVVNLALTIWILKV

SEQ ID NO: 32707 - protein, 40 aa, Artificial Sequence
  Quasi-synthetic sequence derived from human genome
RALRGLSYRSLRRRVRRLRRLTAREAATAVAALLWAAVTR

SEQ ID NO: 32708 - protein, 40 aa, Artificial Sequence
  Quasi-synthetic sequence derived from human genome
FRQRIILRVWWSTWRQRLGQVRVSRALHASALKHRALSLQ

SEQ ID NO: 32709 - protein, 40 aa, Artificial Sequence
  Quasi-synthetic sequence derived from human genome
INCHKVVRDILLEQSLQSHKKLKLTKMRAKKKKKKKKKLK

SEQ ID NO: 32710 - protein, 40 aa, Artificial Sequence
  Quasi-synthetic sequence derived from human genome
LFCLQYLGVRVLLRFQRKLSVLLLLLGRRRVDFRLVNELL

SEQ ID NO: 32711 - protein, 40 aa, Artificial Sequence
  Quasi-synthetic sequence derived from human genome
LRLVWKEVILRKILILVLVQKDVSLTTQYFLQKARSRRHR

SEQ ID NO: 32712 - protein, 40 aa, Artificial Sequence
  Quasi-synthetic sequence derived from human genome
MLRSVWNFLKRHKKKCIFLGTVLGGVYILGKYGQKKIREI

SEQ ID NO: 32713 - protein, 40 aa, Artificial Sequence
  Quasi-synthetic sequence derived from human genome
LRPPSQIPKRKRKAKKRRKNDVVVVKGKLKLCSISGLIAL

SEQ ID NO: 32714 - protein, 40 aa, Artificial Sequence
  Quasi-synthetic sequence derived from human genome
SPQIISFFLALTSTALLFLLFFLTLRFSVVKRGRKKLLYI

SEQ ID NO: 32715 - protein, 40 aa, Artificial Sequence
  Quasi-synthetic sequence derived from human genome
ARGRRAWLSVLLGLVLGFVLASRLVLPRASELKRAGPRRR

SEQ ID NO: 32716 - protein, 40 aa, Artificial Sequence
  Quasi-synthetic sequence derived from human genome
LIQRHWRGHNCRKNYGLMRLGFLRLQALHRSRKLHQQYRL

SEQ ID NO: 32717 - protein, 40 aa, Artificial Sequence
  Quasi-synthetic sequence derived from human genome
PVLAGVVGGVCFLGVAVLVSILAGCLLNRRRAARRRRKRL

SEQ ID NO: 32718 - protein, 40 aa, Artificial Sequence
  Quasi-synthetic sequence derived from human genome
LKMVGPGFLSLGLMMLVCGLVWVPIIKKKQKHRQKSNFLR

SEQ ID NO: 32719 - protein, 40 aa, Artificial Sequence
  Quasi-synthetic sequence derived from human genome
LPIYRHLRRFILSVIVFGSIVLLMLWLPIRIIKSVLPNFL

SEQ ID NO: 32720 - protein, 40 aa, Artificial Sequence
  Quasi-synthetic sequence derived from human genome
CIMYKVPLIRKKSLRRTLSERGLLKDFLKKHNLNPARKYF

SEQ ID NO: 32721 - protein, 40 aa, Artificial Sequence
  Quasi-synthetic sequence derived from human genome
ALRAARLRHQELFRLRGIKAQVALRLAELARRQRRRQARR

SEQ ID NO: 32722 - protein, 40 aa, Artificial Sequence
  Quasi-synthetic sequence derived from human genome
LEELRAQMLIRIVLFLQKVWRGTLARMRYKRTKAALTIIR

SEQ ID NO: 32723 - protein, 40 aa, Artificial Sequence
  Quasi-synthetic sequence derived from human genome
FKFFFWIGYCNSSLNPVIYTVFNQDFRRSFKHILFRRRRR

SEQ ID NO: 32724 - protein, 40 aa, Artificial Sequence
  Quasi-synthetic sequence derived from human genome
GLFALPFGRTAKPAHIAKVKMKFRFLGKLMAKAIMDFRLV

SEQ ID NO: 32725 - protein, 40 aa, Artificial Sequence
  Quasi-synthetic sequence derived from human genome
KIFMLLVVGITSGMWIWTSKTLQSWQQVCSRRLKKKSRRK

SEQ ID NO: 32726 - protein, 40 aa, Artificial Sequence
  Quasi-synthetic sequence derived from human genome
RRPLKNRTDFLVPLLSSVLTVAWICCLVTAFYWCLRKRRK

SEQ ID NO: 32727 - protein, 40 aa, Artificial Sequence
  Quasi-synthetic sequence derived from human genome
LCSPITLGLLVAGVLVLLVSLGVAIHLCCRRRRARLRFMK

SEQ ID NO: 32728 - protein, 40 aa, Artificial Sequence
  Quasi-synthetic sequence derived from human genome
RTKRKPSIKAARAKKIFGWGDFYFRVHTLKFSLLVTGKIV

SEQ ID NO: 32729 - protein, 40 aa, Artificial Sequence
  Quasi-synthetic sequence derived from human genome
LAKRFALKTRSQITKRKRMSLVKEKKAAQTLSAILLAFII

SEQ ID NO: 32730 - protein, 40 aa, Artificial Sequence
  Quasi-synthetic sequence derived from human genome
AKRLAIMMMKKREKYLYQKIMFGKRRKIREANKLAEKRKA

SEQ ID NO: 32731 - protein, 40 aa, Artificial Sequence
  Quasi-synthetic sequence derived from human genome
LCARVRKLRSAGRCGKFHQVRRVMTILFLTMVISYFGCMK

SEQ ID NO: 32732 - protein, 40 aa, Artificial Sequence
  Quasi-synthetic sequence derived from human genome
LKRSIKLLSLIKWKGSKSSKLNSKFWKHLVYEMPIKKKEM

SEQ ID NO: 32733 - protein, 40 aa, Artificial Sequence
  Quasi-synthetic sequence derived from human genome
REHVHNASAHLTFNKFWRRYGKLSRHLMKVKLKKYTKFLF

SEQ ID NO: 32734 - protein, 40 aa, Artificial Sequence
  Quasi-synthetic sequence derived from human genome
IYTFILGFLVPLTIICLCYLFIIIKVKSSGIRVGSSKRKK

SEQ ID NO: 32735 - protein, 40 aa, Artificial Sequence
  Quasi-synthetic sequence derived from human genome
IVDKIRRKNCPACRLRKCCQAGMVLGGRKFKKFNKVRVVR

SEQ ID NO: 32736 - protein, 40 aa, Artificial Sequence
  Quasi-synthetic sequence derived from human genome
PITGWRKTVCHNGVLGLSRLLFFLLGFLRIRVRGQRASRL

SEQ ID NO: 32737 - protein, 40 aa, Artificial Sequence
  Quasi-synthetic sequence derived from human genome
DRARRRRRRRRRRDLLLSQLCFLASVALLLWSLSSLREQK

SEQ ID NO: 32738 - protein, 40 aa, Artificial Sequence
  Quasi-synthetic sequence derived from human genome
RRKILSLFYSLFNPILNPLIYSLRNAEVKGALKRVLWKQR

SEQ ID NO: 32739 - protein, 40 aa, Artificial Sequence
  Quasi-synthetic sequence derived from human genome
MVLKPHFHKDWQRRVATWFNQPARKIRRRKARQAKARRIA

SEQ ID NO: 32740 - protein, 40 aa, Artificial Sequence
  Quasi-synthetic sequence derived from human genome
LLGRKRRWSKCKIRVFVGGQINRMDQERKAIISLLSKFRL

SEQ ID NO: 32741 - protein, 40 aa, Artificial Sequence
  Quasi-synthetic sequence derived from human genome
MCFLRRPGAPASWIWWRMLRQVLRRGLQSFCHRLGLCVSR

SEQ ID NO: 32742 - protein, 40 aa, Artificial Sequence
  Quasi-synthetic sequence derived from human genome
MLKSIKTRLGRRVPAAPPALRRNLLLQAWKCVCNWASRLF

SEQ ID NO: 32743 - protein, 40 aa, Artificial Sequence
  Quasi-synthetic sequence derived from human genome
YRGRLSPVPVPRAVPVKRPRVTVPLVRRVKTNVPVKLFAR

SEQ ID NO: 32744 - protein, 40 aa, Artificial Sequence
  Quasi-synthetic sequence derived from human genome
VIKIQSSYRRWMIRKRMREMHRAATFIQSTFRMHRLHMRY

SEQ ID NO: 32745 - protein, 40 aa, Artificial Sequence
  Quasi-synthetic sequence derived from human genome
LSIFYLLKIANFSNLLFLHLKRRVRSVILVILLGTLIFLV

SEQ ID NO: 32746 - protein, 40 aa, Artificial Sequence
  Quasi-synthetic sequence derived from human genome
KCAIIIQSYYRMHVQQKKWKIMKKAALLIQKYYRAYSIGR

SEQ ID NO: 32747 - protein, 40 aa, Artificial Sequence
  Quasi-synthetic sequence derived from human genome
LMAHPFLLLILLCMSLLLFQVIRLYQRRRWMIRALHLFPA

SEQ ID NO: 32748 - protein, 40 aa, Artificial Sequence
  Quasi-synthetic sequence derived from human genome
KKTFIVLNKGKAIFRFSATPALYLLSPFSVVRRGAIKVLI

SEQ ID NO: 32749 - protein, 40 aa, Artificial Sequence
  Quasi-synthetic sequence derived from human genome
LLRRWKHWLLLLGICCPKPHGRVSSRLRLSRSLGHFFHSA

SEQ ID NO: 32750 - protein, 40 aa, Artificial Sequence
  Quasi-synthetic sequence derived from human genome
PWRVIGYHVVVWMMAGIPLLLFRWKPLWGVRLRLRPCNLA

SEQ ID NO: 32751 - protein, 40 aa, Artificial Sequence
  Quasi-synthetic sequence derived from human genome
KKQRLSKKLRRKLQMWLWSQTFCPVLYAWNDLGSRFWPRY

SEQ ID NO: 32752 - protein, 40 aa, Artificial Sequence
  Quasi-synthetic sequence derived from human genome
RSKNWRLSVRCGGWPLRWLMENGFLPDPPRIRYRKKKRIL

SEQ ID NO: 32753 - protein, 40 aa, Artificial Sequence
  Quasi-synthetic sequence derived from human genome
RSSRQSSFIAVGILGVVLLAIFVALFFLTKKRRQRQRLAV

SEQ ID NO: 32754 - protein, 40 aa, Artificial Sequence
  Quasi-synthetic sequence derived from human genome
ITYDIFKKKAHKLTSAPLKQNFQKLLKLFYIKKLKPLYNY

SEQ ID NO: 32755 - protein, 40 aa, Artificial Sequence
  Quasi-synthetic sequence derived from human genome
RKQIFILLFQRLQNSKTTKFIKSFLVFINLYCIKYGALAL

SEQ ID NO: 32756 - protein, 40 aa, Artificial Sequence
  Quasi-synthetic sequence derived from human genome
FVFFRKLTTIFPLNWKYRKALSLGCQRVTLHKNMFLTYIL

SEQ ID NO: 32757 - protein, 40 aa, Artificial Sequence
  Quasi-synthetic sequence derived from human genome
KFKFFFQRNPYFRNKLIVKVYEVRSFGQVVSFSTLIMWRR

SEQ ID NO: 32758 - protein, 40 aa, Artificial Sequence
  Quasi-synthetic sequence derived from human genome
MILCYIWLLVLLLHKHRSILLRRLCSLMGTVFLLRCFTMF

SEQ ID NO: 32759 - protein, 40 aa, Artificial Sequence
  Quasi-synthetic sequence derived from human genome
RFIKYFVKGRQAVLSMVRKAKYRELLLSELLGRRAPVVVR

SEQ ID NO: 32760 - protein, 40 aa, Artificial Sequence
  Quasi-synthetic sequence derived from human genome
DIVKQGYVKIRSRKLGIFRRCWLVFKKASSKGPRRLEKFP

SEQ ID NO: 32761 - protein, 40 aa, Artificial Sequence
  Quasi-synthetic sequence derived from human genome
RRAFQKRQQQQSALRVMQRNCAAYLKLRHWQWWRLFTKVK

SEQ ID NO: 32762 - protein, 40 aa, Artificial Sequence
  Quasi-synthetic sequence derived from human genome
FCKAIRFSYPSIHPFILIWGNKKLKQTFLSVFWQMRYWVK

SEQ ID NO: 32763 - protein, 40 aa, Artificial Sequence
  Quasi-synthetic sequence derived from human genome
WLLYCHKTRLKKILKESRQRHLENFRIRAKHLAANWNRIR

SEQ ID NO: 32764 - protein, 40 aa, Artificial Sequence
  Quasi-synthetic sequence derived from human genome
YIPRKRGKNPMKAVGLAWYSLYTRTWLGYLFYRQQLRRAR

SEQ ID NO: 32765 - protein, 40 aa, Artificial Sequence
  Quasi-synthetic sequence derived from human genome
KRKKGLRIKGKRRRKKLILAKKFSKDLGSGRPVADAPALL

SEQ ID NO: 32766 - protein, 40 aa, Artificial Sequence
  Quasi-synthetic sequence derived from human genome
VAKMFPKVRESQLLLNVVSQLAKRNLRLLVLGRKHMLRRS

SEQ ID NO: 32767 - protein, 40 aa, Artificial Sequence
  Quasi-synthetic sequence derived from human genome
RYLTRRRRIEIAHALCLTERQIKIWFQNRRMKWKKESKLL

SEQ ID NO: 32768 - protein, 40 aa, Artificial Sequence
  Quasi-synthetic sequence derived from human genome
VWRQTRTLLLKNYLIKCRTKKSSVQEILFPLFFLFWLILI

SEQ ID NO: 32769 - protein, 40 aa, Artificial Sequence
  Quasi-synthetic sequence derived from human genome
FFFNISGILLWYPVPCTRLPIRMAKALGKRTAKYRWFAVL

SEQ ID NO: 32770 - protein, 40 aa, Artificial Sequence
  Quasi-synthetic sequence derived from human genome
RKNLKSLIIVHPSWFIRTLLAVTRPFISSKFSQKIRYVFN

SEQ ID NO: 32771 - protein, 40 aa, Artificial Sequence
  Quasi-synthetic sequence derived from human genome
RKVRRKEPKSQDIYLRLLVKLYRFLARRTNSTFNQVVLKR

SEQ ID NO: 32772 - protein, 40 aa, Artificial Sequence
  Quasi-synthetic sequence derived from human genome
RKLLMLKKEKLEKVQNKAASLIQGYWRRYSTRQRFLKLKY

SEQ ID NO: 32773 - protein, 40 aa, Artificial Sequence
  Quasi-synthetic sequence derived from human genome
KFLLAFLVPLAIIASSHAAVSLRLQHRGRRRPGRFVRLVA

SEQ ID NO: 32774 - protein, 40 aa, Artificial Sequence
  Quasi-synthetic sequence derived from human genome
QIYRFLRTRNLIAPIFLHRTLTYMSHRNSRTNIKRKTFKV

SEQ ID NO: 32775 - protein, 40 aa, Artificial Sequence
  Quasi-synthetic sequence derived from human genome
RYLTRRRRIEIAHALCLSERQIKIWFQNRRMKWKKDNKLK

SEQ ID NO: 32776 - protein, 40 aa, Artificial Sequence
  Quasi-synthetic sequence derived from human genome
KWKNIPCSWVGRINIVKMAILPKVIYRFNAIPIKLPMTFF

SEQ ID NO: 32777 - protein, 40 aa, Artificial Sequence
  Quasi-synthetic sequence derived from human genome
VALIMREKLIRLQSLYIDQFKRLQHLLKEKKRRYLHNRKV

SEQ ID NO: 32778 - protein, 40 aa, Artificial Sequence
  Quasi-synthetic sequence derived from human genome
RGLILPVRTLLLKFFSKIYQTEELRSCRFRYRSKVLSRWL

SEQ ID NO: 32779 - protein, 40 aa, Artificial Sequence
  Quasi-synthetic sequence derived from human genome
RHKLLKLSVLLPLIFTILLLLLVAASLLAWRMMKYQQKGT

SEQ ID NO: 32780 - protein, 40 aa, Artificial Sequence
  Quasi-synthetic sequence derived from human genome
FKKCIKSTVGFDAIRVYNKRLKALRKIQKLIKSGQLRATK

SEQ ID NO: 32781 - protein, 40 aa, Artificial Sequence
  Quasi-synthetic sequence derived from human genome
KTFVVLNRGKTLFRFSATPALYILSPFNLIRRIAIKILIH

SEQ ID NO: 32782 - protein, 40 aa, Artificial Sequence
  Quasi-synthetic sequence derived from human genome
KLIRSVFMGLRTRRLGTRGNSKYHYYGLRIKASSPLLRLM

SEQ ID NO: 32783 - protein, 40 aa, Artificial Sequence
  Quasi-synthetic sequence derived from human genome
RSMVMRYGSRLWKLRVLQAELKINIRLTPTGKAIPIRLFL

SEQ ID NO: 32784 - protein, 40 aa, Artificial Sequence
  Quasi-synthetic sequence derived from human genome
VRTEAVMRRHCRTLRQRSRRPKMRPARRRGGRRQLLLRAL

SEQ ID NO: 32785 - protein, 40 aa, Artificial Sequence
  Quasi-synthetic sequence derived from human genome
LRPIGLLRAQSLEWFYNNVKSRFKRFGSAKVLKNLYRKHR

SEQ ID NO: 32786 - protein, 40 aa, Artificial Sequence
  Quasi-synthetic sequence derived from human genome
IRTLRDQLLLLHNQLLYERFKRQQHALRNRRLLRKVIKAA

SEQ ID NO: 32787 - protein, 40 aa, Artificial Sequence
  Quasi-synthetic sequence derived from human genome
LRIWILVLQVRQRVKPDRKPKLKPQDFRNFVTMFVVFVLF

SEQ ID NO: 32788 - protein, 40 aa, Artificial Sequence
  Quasi-synthetic sequence derived from human genome
TRRRRRAKITGRERKAMRVLPVVVGAFLLCWTPFFVVHIT

SEQ ID NO: 32789 - protein, 40 aa, Artificial Sequence
  Quasi-synthetic sequence derived from human genome
LPKPKRRRLSKLRTRHCTQAWAIRINPWVEKKKKIKKQNK

SEQ ID NO: 32790 - protein, 40 aa, Artificial Sequence
  Quasi-synthetic sequence derived from human genome
KVAVKILNRQKIRSLDVVGKIRREIQNLKLFRHPHIIKLY

SEQ ID NO: 32791 - protein, 40 aa, Artificial Sequence
  Quasi-synthetic sequence derived from human genome
RLDKLRQSCVMVQKHMRGWLQRKKFLRERRAALIIQQYFR

SEQ ID NO: 32792 - protein, 40 aa, Artificial Sequence
  Quasi-synthetic sequence derived from human genome
LIQRKYRAHLCTKHHLQFLQVQNAVIKIQSSYRRWMIRKR

SEQ ID NO: 32793 - protein, 40 aa, Artificial Sequence
  Quasi-synthetic sequence derived from human genome
LKKYKIACIVLLALLVIMSLGLGLGLGLRKLEKQGSCRKK

SEQ ID NO: 32794 - protein, 40 aa, Artificial Sequence
  Quasi-synthetic sequence derived from human genome
SLNKMRKTIGGVALWRQQICAIARVRLLKLKHERKALLAL

SEQ ID NO: 32795 - protein, 40 aa, Artificial Sequence
  Quasi-synthetic sequence derived from human genome
RPLVLTAWGLALEMAWVEPAWAAHWLMRRRRRKQRKKKAW

SEQ ID NO: 32796 - protein, 40 aa, Artificial Sequence
  Quasi-synthetic sequence derived from human genome
VLLLLLLLLLFLILRHRRQGKHWTSSPAQLPTPRKKTSML

SEQ ID NO: 32797 - protein, 40 aa, Artificial Sequence
  Quasi-synthetic sequence derived from human genome
FLMLINVDRYAAIVHPLRLRHLRRPRVARLLCLGVWALIL

SEQ ID NO: 32798 - protein, 40 aa, Artificial Sequence
  Quasi-synthetic sequence derived from human genome
LALLIPYLHFLIFLFILRCLEMNCRKKLMRKDPVFRISPR

SEQ ID NO: 32799 - protein, 40 aa, Artificial Sequence
  Quasi-synthetic sequence derived from human genome
IIQKHCRGYLVRSLYQLIRMATITMQAYSRGFLARRRYRK

SEQ ID NO: 32800 - protein, 40 aa, Artificial Sequence
  Quasi-synthetic sequence derived from human genome
CAILKQKAPQQYRIRAKLRSYKPRRLFQSVKLHCPKCHLL

SEQ ID NO: 32801 - protein, 40 aa, Artificial Sequence
  Quasi-synthetic sequence derived from human genome
FPARLKKVLIVGAPIWFRVPYSIISLLLKDKVRERIQILK

SEQ ID NO: 32802 - protein, 40 aa, Artificial Sequence
  Quasi-synthetic sequence derived from human genome
AQKYVLARRRLVKVINNRAKLLSLCSFIIETCLFILWRHL

SEQ ID NO: 32803 - protein, 40 aa, Artificial Sequence
  Quasi-synthetic sequence derived from human genome
KLKAVLQKQGIWSEIHFILTNPRSLKHLCRLKIRKCMGRL

SEQ ID NO: 32804 - protein, 40 aa, Artificial Sequence
  Quasi-synthetic sequence derived from human genome
LMIRRLRGVRLLSGSREKDRNLRRITRLVLVVVAVFVGCW

SEQ ID NO: 32805 - protein, 40 aa, Artificial Sequence
  Quasi-synthetic sequence derived from human genome
PTQKTARLFSKKIFCCLFFITLFFIRLLSYMFFHVRFINP

SEQ ID NO: 32806 - protein, 40 aa, Artificial Sequence
  Quasi-synthetic sequence derived from human genome
MVLKTLTKPVTLSRSKINKTKVLKMIFVHLIIFCFCFVPY

SEQ ID NO: 32807 - protein, 40 aa, Artificial Sequence
  Quasi-synthetic sequence derived from human genome
LKMNISVLVLPLFIFTFLYVQMRKTLRFREQRYSLFKLVF

SEQ ID NO: 32808 - protein, 40 aa, Artificial Sequence
  Quasi-synthetic sequence derived from human genome
RGRALGGRAVRSRRAIAVLSRWPAFPAFRAFLTFLYRYSV

SEQ ID NO: 32809 - protein, 40 aa, Artificial Sequence
  Quasi-synthetic sequence derived from human genome
LVWRVLHALLCLHRTLTSWLRVRFGTWNWIWRRCCRAASA

SEQ ID NO: 32810 - protein, 40 aa, Artificial Sequence
  Quasi-synthetic sequence derived from human genome
RRGRRRTRAAGSLLSRAAILLFISAFLVRVPSSVGHLVRL

SEQ ID NO: 32811 - protein, 40 aa, Artificial Sequence
  Quasi-synthetic sequence derived from human genome
LKKGVFNKSRCTICSKLAEVWIFIPKLLFRLTVIILTFKC

SEQ ID NO: 32812 - protein, 40 aa, Artificial Sequence
  Quasi-synthetic sequence derived from human genome
WKNWLGVKRQPLWTLVLILWPVIIFIILAITRTKFPPTAK

SEQ ID NO: 32813 - protein, 40 aa, Artificial Sequence
  Quasi-synthetic sequence derived from human genome
IWAYWLGLKVRREYRKFFRANAGKKIYEFTLQRIVQKYFL

SEQ ID NO: 32814 - protein, 40 aa, Artificial Sequence
  Quasi-synthetic sequence derived from human genome
VRALHRLHQFQQLLWVLGLLVGLLLLLLGLGACYTWRRRR

SEQ ID NO: 32815 - protein, 40 aa, Artificial Sequence
  Quasi-synthetic sequence derived from human genome
RVLKRKTFNKVLGHVNNILISAVLPTAFRVAKKRAPKVLG

SEQ ID NO: 32816 - protein, 40 aa, Artificial Sequence
  Quasi-synthetic sequence derived from human genome
LVRHKFNRLPRVLILHLKRYSFNVALSLNNKIGQQVIIPR

SEQ ID NO: 32817 - protein, 40 aa, Artificial Sequence
  Quasi-synthetic sequence derived from human genome
GRVQGWALTRQQLQALLLKRFLLARRSRRGLFAQIVLPAL

SEQ ID NO: 32818 - protein, 40 aa, Artificial Sequence
  Quasi-synthetic sequence derived from human genome
LNLRYSFLKTASFFVRLGPMALAFKVRGLLDCKHSWKRLK

SEQ ID NO: 32819 - protein, 40 aa, Artificial Sequence
  Quasi-synthetic sequence derived from human genome
SLAKRIKTFYALAPVATVKYTKSLINKLRFVPQSLFKFIF

SEQ ID NO: 32820 - protein, 40 aa, Artificial Sequence
  Quasi-synthetic sequence derived from human genome
MCYALCNKAFRDTFRLLLLCRWDKRRWRKIPKRPGSVHRT

SEQ ID NO: 32821 - protein, 40 aa, Artificial Sequence
  Quasi-synthetic sequence derived from human genome
RFLNVRASAIIIQRKWRAILPAKIAHEHFLMIKRHRAACL

SEQ ID NO: 32822 - protein, 40 aa, Artificial Sequence
  Quasi-synthetic sequence derived from human genome
KKLRPHLAKVLVYELLLGKGFRGGGGRWKALLGRHQARLK

SEQ ID NO: 32823 - protein, 40 aa, Artificial Sequence
  Quasi-synthetic sequence derived from human genome
RGHRKRSRRVLYPRVVRRQLPVEEPNPAKRLLFLLLTIVF

SEQ ID NO: 32824 - protein, 40 aa, Artificial Sequence
  Quasi-synthetic sequence derived from human genome
RAVRNLKKKLLPWQRRGLLRAQGLRGWKARRATTGTQTLL

SEQ ID NO: 32825 - protein, 40 aa, Artificial Sequence
  Quasi-synthetic sequence derived from human genome
WSWLRRRRARGIPPGPTPWPLVGNFGHVLLPPFLRRRSWL

SEQ ID NO: 32826 - protein, 40 aa, Artificial Sequence
  Quasi-synthetic sequence derived from human genome
LIAIAIVAVLLVLTCCFCICKKCLFKKKNKKKGKEKGGKN

SEQ ID NO: 32827 - protein, 40 aa, Artificial Sequence
  Quasi-synthetic sequence derived from human genome
ILYYIVSKQFQARVISVMLYRNYLRSMRRKSFRSGSLRSL

SEQ ID NO: 32828 - protein, 40 aa, Artificial Sequence
  Quasi-synthetic sequence derived from human genome
LFRATRKPLSGRTPRLVYKWFLLIYKLSYAFGVVGYLAIM

SEQ ID NO: 32829 - protein, 40 aa, Artificial Sequence
  Quasi-synthetic sequence derived from human genome
KRLLPLLSLIFPTVLHGVLHYIISSVIQKFVLLILKRKTY

SEQ ID NO: 32830 - protein, 40 aa, Artificial Sequence
  Quasi-synthetic sequence derived from human genome
NKVLPMRRVLRKRPSPAPRTIRIEWLKSKSTKAATKFMLK

SEQ ID NO: 32831 - protein, 40 aa, Artificial Sequence
  Quasi-synthetic sequence derived from human genome
RKKWVDLAWMITFYVRFFLTYVPLLGLKAFLGLFFIVRFL

SEQ ID NO: 32832 - protein, 40 aa, Artificial Sequence
  Quasi-synthetic sequence derived from human genome
KRRRFSSKPVVLTEAQKQLMICHLPQVLRLHLKRFRWSGR

SEQ ID NO: 32833 - protein, 40 aa, Artificial Sequence
  Quasi-synthetic sequence derived from human genome
RRRKTVRLLLANLVIFLLCFVPYNSTLAVYGLLRSKLVAA

SEQ ID NO: 32834 - protein, 40 aa, Artificial Sequence
  Quasi-synthetic sequence derived from human genome
TILASQKVKKIWQKQFRWPKNRLQILKFCKAREDLLKIQK

SEQ ID NO: 32835 - protein, 40 aa, Artificial Sequence
  Quasi-synthetic sequence derived from human genome
GQKLLLFYILGTVVAILLLLALALGLLVYRKRRAKREEKK

SEQ ID NO: 32836 - protein, 40 aa, Artificial Sequence
  Quasi-synthetic sequence derived from human genome
RSLLVLRLCAWPALLARHEQLLYVSRKLLGQRLFNKLMKM

SEQ ID NO: 32837 - protein, 40 aa, Artificial Sequence
  Quasi-synthetic sequence derived from human genome
RLAPMRLYTLSKRHFVLVFVVFFICFGLTIFVGIRGPKVI

SEQ ID NO: 32838 - protein, 40 aa, Artificial Sequence
  Quasi-synthetic sequence derived from human genome
LRFPVFLAILINFFIFVRIVQLLVAKLRARQMHHTDYKFR

SEQ ID NO: 32839 - protein, 40 aa, Artificial Sequence
  Quasi-synthetic sequence derived from human genome
KRIKNAAANVLRETWLIYKHTKLLKKIDHAKVRKHQRKFL

SEQ ID NO: 32840 - protein, 40 aa, Artificial Sequence
  Quasi-synthetic sequence derived from human genome
LSYARTSIRASLTFNRGFKAGRNMRRKLFGVLRLKCHSLF

SEQ ID NO: 32841 - protein, 40 aa, Artificial Sequence
  Quasi-synthetic sequence derived from human genome
DKKRVRFTKRKQKVPGFPKRFTVKPVVLGFPYFHSGRHFW

SEQ ID NO: 32842 - protein, 40 aa, Artificial Sequence
  Quasi-synthetic sequence derived from human genome
VPKPVSKKHGKLITFLRTFMKSRPTKQKLKQRGILKERVF

SEQ ID NO: 32843 - protein, 40 aa, Artificial Sequence
  Quasi-synthetic sequence derived from human genome
HFFRGLLYWKNTLALAAILVLLRVRQCLSLRPAPAMRVAR

SEQ ID NO: 32844 - protein, 40 aa, Artificial Sequence
  Quasi-synthetic sequence derived from human genome
RIIILKIVHRRIINRFHSFLLFMGHPPYAIREVNINKFCR

SEQ ID NO: 32845 - protein, 40 aa, Artificial Sequence
  Quasi-synthetic sequence derived from human genome
RALPTSRLDLACSLSWNVIRYSLQKLRLVRWLLKKVFQCR

SEQ ID NO: 32846 - protein, 40 aa, Artificial Sequence
  Quasi-synthetic sequence derived from human genome
VLHERYLARGCARRARGRWEGSAPRRLLLALHRRLRGLRR

SEQ ID NO: 32847 - protein, 40 aa, Artificial Sequence
  Quasi-synthetic sequence derived from human genome
RRKKSSARKFGLQKLWEWCLGLVQMSSLPWRVVIGRLGRI

SEQ ID NO: 32848 - protein, 40 aa, Artificial Sequence
  Quasi-synthetic sequence derived from human genome
MIAHLGVFPSKAERKITSRPFTRFRTAVRVVIAILRLRFL

SEQ ID NO: 32849 - protein, 40 aa, Artificial Sequence
  Quasi-synthetic sequence derived from human genome
IFSKVRIFGLKKRRLRRQDPQLKGIVTRLYCRQGYYLQMH

SEQ ID NO: 32850 - protein, 40 aa, Artificial Sequence
  Quasi-synthetic sequence derived from human genome
IGFLLAVVLTVAFITFKCCAYGYRKCLGKKGRVKKAHKSK

SEQ ID NO: 32851 - protein, 40 aa, Artificial Sequence
  Quasi-synthetic sequence derived from human genome
IRGRILSGVVTKMKMQRTIVIRRDYLHYIRKYNRFEKRHK

SEQ ID NO: 32852 - protein, 40 aa, Artificial Sequence
  Quasi-synthetic sequence derived from human genome
LFLGRWLVVRLATKWCQRKLQAELKIGSFRFFWIQNVSLK

SEQ ID NO: 32853 - protein, 40 aa, Artificial Sequence
  Quasi-synthetic sequence derived from human genome
RARLKTVKFHARTGMIESNRSIKTKRKKSFRLSRKFPFYK

SEQ ID NO: 32854 - protein, 40 aa, Artificial Sequence
  Quasi-synthetic sequence derived from human genome
IASAGVAVYRKYICTSFYPWVNILKISFKRKKFFIHQRQK

SEQ ID NO: 32855 - protein, 40 aa, Artificial Sequence
  Quasi-synthetic sequence derived from human genome
VARLWGVRKCKPQMNYDKLSRALRYYYNKRILHKTKGKRF

SEQ ID NO: 32856 - protein, 40 aa, Artificial Sequence
  Quasi-synthetic sequence derived from human genome
FVRACLRRLVPPGLWGSRHNERRFLRNTKKFISLGKHAKL

SEQ ID NO: 32857 - protein, 40 aa, Artificial Sequence
  Quasi-synthetic sequence derived from human genome
FPRITYPLVHLANWLCGLNLFWICKTCFRCLKRLKMSWFL

SEQ ID NO: 32858 - protein, 40 aa, Artificial Sequence
  Quasi-synthetic sequence derived from human genome
KKTFIVMNKGKAIFRFSATSALYILTPLNPVRKIAIKILV

SEQ ID NO: 32859 - protein, 40 aa, Artificial Sequence
  Quasi-synthetic sequence derived from human genome
FFRRAMKRNARLRCPFRKGACEITRKTRRQCQACRLRKCL

SEQ ID NO: 32860 - protein, 40 aa, Artificial Sequence
  Quasi-synthetic sequence derived from human genome
RHKKAYVVCTFVFGYLLPLLLICFCYAKVLNHLHKKLKNM

SEQ ID NO: 32861 - protein, 40 aa, Artificial Sequence
  Quasi-synthetic sequence derived from human genome
QVYKVGIYGWRKRCLYFFVLLLMILILVNLAMTIWILKVM

SEQ ID NO: 32862 - protein, 40 aa, Artificial Sequence
  Quasi-synthetic sequence derived from human genome
LAILKAVKIIQGCFYTKLERTRFLNVRASAIIIQRKWRAI

SEQ ID NO: 32863 - protein, 40 aa, Artificial Sequence
  Quasi-synthetic sequence derived from human genome
RVIHDGARLFRIKCVTRIQAYWRGCVVRKWYRNLRKTVPP

SEQ ID NO: 32864 - protein, 40 aa, Artificial Sequence
  Quasi-synthetic sequence derived from human genome
LQRAALKFLAKCRKKKKLFAPWRGLQELTDARRVELKKRV

SEQ ID NO: 32865 - protein, 40 aa, Artificial Sequence
  Quasi-synthetic sequence derived from human genome
KIAARMLWRILNGHSLTRRERRQFLRICADLFRLVPFLVF

SEQ ID NO: 32866 - protein, 40 aa, Artificial Sequence
  Quasi-synthetic sequence derived from human genome
WLRLLPFLGVLALLGYLAVRPFLPKKKQQKDSLINLKIQK

SEQ ID NO: 32867 - protein, 40 aa, Artificial Sequence
  Quasi-synthetic sequence derived from human genome
LWPVICLNKRTRRSIQKLIEWENNRLYHKLALHWKLTKRK

SEQ ID NO: 32868 - protein, 40 aa, Artificial Sequence
  Quasi-synthetic sequence derived from human genome
IIFRFLTRFFYAKKKASYSQISQKNLDFTILLRLKTLRSV

SEQ ID NO: 32869 - protein, 40 aa, Artificial Sequence
  Quasi-synthetic sequence derived from human genome
FFRLFRVMRLVKLLSRGEGIRTLLWTFIKSFQALPYVALL

SEQ ID NO: 32870 - protein, 40 aa, Artificial Sequence
  Quasi-synthetic sequence derived from human genome
RRIVVSRGRLRRLLWIGFTLTAVALILWQCALLVFSFYTV

SEQ ID NO: 32871 - protein, 40 aa, Artificial Sequence
  Quasi-synthetic sequence derived from human genome
GKKINKLFCFNFLVQCFRGKSKPSKCQIRKKVKNHIERLL

SEQ ID NO: 32872 - protein, 40 aa, Artificial Sequence
  Quasi-synthetic sequence derived from human genome
MWICQVCRPKKKGRKLLHEKAAQIKRRYAKPIGRPKNKLK

SEQ ID NO: 32873 - protein, 40 aa, Artificial Sequence
  Quasi-synthetic sequence derived from human genome
ACLLDFQRALALFVLTCVVLTFLGHRLLKRLLGPKLRRFL

SEQ ID NO: 32874 - protein, 40 aa, Artificial Sequence
  Quasi-synthetic sequence derived from human genome
ILIYKNRVRMNTFPWLKIVKISFKCKQFFIQLRKELHESR

SEQ ID NO: 32875 - protein, 40 aa, Artificial Sequence
  Quasi-synthetic sequence derived from human genome
RKRKISVCQQTWALLCKNFLKKWRMKRESLMEWLNSLLLL

SEQ ID NO: 32876 - protein, 40 aa, Artificial Sequence
  Quasi-synthetic sequence derived from human genome
RRRIKSLLPKLSCGVKNRMHIRRKRIVGGKRAQLGDLPWQ

SEQ ID NO: 32877 - protein, 40 aa, Artificial Sequence
  Quasi-synthetic sequence derived from human genome
IKSSFLLKFIRKMTSRHWCAVPILFLSKALANVPRHKALG

SEQ ID NO: 32878 - protein, 40 aa, Artificial Sequence
  Quasi-synthetic sequence derived from human genome
KKQRKILWRKGIHLAFSEKWNTGFGGFKKFYFHQHLCILK

SEQ ID NO: 32879 - protein, 40 aa, Artificial Sequence
  Quasi-synthetic sequence derived from human genome
YKFLRFRRSLLLLVKHSCVESLFLVRNFCILYYFLGYIPK

SEQ ID NO: 32880 - protein, 40 aa, Artificial Sequence
  Quasi-synthetic sequence derived from human genome
ALVMLAARHYWNAWLPLLSSAVYRKKAKGALKRLIGIINK

SEQ ID NO: 32881 - protein, 40 aa, Artificial Sequence
  Quasi-synthetic sequence derived from human genome
VLLQLRYTGILETARIRRLGFSHRILFANFIKRYYLLCYK

SEQ ID NO: 32882 - protein, 40 aa, Artificial Sequence
  Quasi-synthetic sequence derived from human genome
RRGRLARCWARCRDWRRMALVSALLLMLFCVALWPVQCAL

SEQ ID NO: 32883 - protein, 40 aa, Artificial Sequence
  Quasi-synthetic sequence derived from human genome
LTLLVGNHTQRTAILGLWKIARKWMRRKMGKWPAVVVMGW

SEQ ID NO: 32884 - protein, 40 aa, Artificial Sequence
  Quasi-synthetic sequence derived from human genome
KHWFQLCRPMNPRARKNCSQIALFQKRRFQFFCSMRCRAW

SEQ ID NO: 32885 - protein, 40 aa, Artificial Sequence
  Quasi-synthetic sequence derived from human genome
KKTFIVLNKGKAISRFSATPALYILTPFNPIRKLAIKILV

SEQ ID NO: 32886 - protein, 40 aa, Artificial Sequence
  Quasi-synthetic sequence derived from human genome
LVRAHRHRGLRPRRQKALRMILAVVLVFFVCWLPENVFIS

SEQ ID NO: 32887 - protein, 40 aa, Artificial Sequence
  Quasi-synthetic sequence derived from human genome
VPPLLKSFLQERLGIHLIRRKIVKPKHHVLMSRKESWKVK

SEQ ID NO: 32888 - protein, 40 aa, Artificial Sequence
  Quasi-synthetic sequence derived from human genome
TKLIRRRPFRQIQVLEPLNLLITISGHKNRLRVYHLTWLR

SEQ ID NO: 32889 - protein, 40 aa, Artificial Sequence
  Quasi-synthetic sequence derived from human genome
RSPLLLLAMWGPQAPPCLCRKRGRGACIKCERLRPRIRRR

SEQ ID NO: 32890 - protein, 40 aa, Artificial Sequence
  Quasi-synthetic sequence derived from human genome
RAKLLAKNRQTFLLQTTKLTRLARRMCRDLLQPRRAARRP

SEQ ID NO: 32891 - protein, 40 aa, Artificial Sequence
  Quasi-synthetic sequence derived from human genome
KFKHLKKLLLAHGHLYYVRIAHLVQYFFYKNLCFILPQFL

SEQ ID NO: 32892 - protein, 40 aa, Artificial Sequence
  Quasi-synthetic sequence derived from human genome
WKAAFCLTDVHKMPYFTRLILFLFCLMVLVESRKPKRKRW

SEQ ID NO: 32893 - protein, 40 aa, Artificial Sequence
  Quasi-synthetic sequence derived from human genome
RPARFSFRLRPVFNASVQFLHCQLSRCRRLRGVRRAPAPL

SEQ ID NO: 32894 - protein, 40 aa, Artificial Sequence
  Quasi-synthetic sequence derived from human genome
LIIAKMRMVALKAGWQQRKRSERKITLMVMMVVMVFVICW

SEQ ID NO: 32895 - protein, 40 aa, Artificial Sequence
  Quasi-synthetic sequence derived from human genome
LIMRLKMFLTPHMCVMASLICSRQLFGWLFRRVRFEKVIF

SEQ ID NO: 32896 - protein, 40 aa, Artificial Sequence
  Quasi-synthetic sequence derived from human genome
RLRRRGRSGLQPRVGKSTAILLGITTLFTLLWAPRVFVML

SEQ ID NO: 32897 - protein, 40 aa, Artificial Sequence
  Quasi-synthetic sequence derived from human genome
RMWGRLVGLVYILPAAYFWRKGWLSRGMKGRVLALCGLVC

SEQ ID NO: 32898 - protein, 40 aa, Artificial Sequence
  Quasi-synthetic sequence derived from human genome
ARFSLSLLLFFLPLAITAFCYVGCLRALARSGLTHRRKLR

SEQ ID NO: 32899 - protein, 40 aa, Artificial Sequence
  Quasi-synthetic sequence derived from human genome
RCLGRREYVKKRQAAIKLEAHWRGALARKAIQRRKWAVRI

SEQ ID NO: 32900 - protein, 40 aa, Artificial Sequence
  Quasi-synthetic sequence derived from human genome
KSVWYRIAFWLQWFNSFVNPLLYPLCHKRFQKAFLKIFCI

SEQ ID NO: 32901 - protein, 40 aa, Artificial Sequence
  Quasi-synthetic sequence derived from human genome
YNFLKRQKAPRSKLISVLKILYQIVPSHKLMLEFHTLLRK

SEQ ID NO: 32902 - protein, 40 aa, Artificial Sequence
  Quasi-synthetic sequence derived from human genome
LRRAIVFTRQLVTYIVVGVTLRPAILVIPCLLLIKCHLKL

SEQ ID NO: 32903 - protein, 40 aa, Artificial Sequence
  Quasi-synthetic sequence derived from human genome
GFPVSWRTRMRAFHLSLPGGAQLLTYLVKVLKRRTWRRNV

SEQ ID NO: 32904 - protein, 40 aa, Artificial Sequence
  Quasi-synthetic sequence derived from human genome
VILATLGVALLFIVRKKRKEKRLKRLRDAKSLAEMLISKN

SEQ ID NO: 32905 - protein, 40 aa, Artificial Sequence
  Quasi-synthetic sequence derived from human genome
LPFVLAAAVSRKKKRRMGTYSLVPKKKTKVLKQRTVIEMF

SEQ ID NO: 32906 - protein, 40 aa, Artificial Sequence
  Quasi-synthetic sequence derived from human genome
MRVSGVLRLLALIFAIVTTWMFIRSYMSFSMKTIRLPRWL

SEQ ID NO: 32907 - protein, 40 aa, Artificial Sequence
  Quasi-synthetic sequence derived from human genome
LPVLGKLKRNMMPWALQKKREIHMAKAHRRRAARSALPMR

SEQ ID NO: 32908 - protein, 40 aa, Artificial Sequence
  Quasi-synthetic sequence derived from human genome
PVLGKLKRNMMPWALQKKREIHMAKAHRRRAARSALPMRL

SEQ ID NO: 32909 - protein, 40 aa, Artificial Sequence
  Quasi-synthetic sequence derived from human genome
LALLLWKNYTLQKRKVLVTVLELFLPLLFSGILIWLRLKI

SEQ ID NO: 32910 - protein, 40 aa, Artificial Sequence
  Quasi-synthetic sequence derived from human genome
YFLITFLFGMVVLALVVWKIFTLSRATAVKERGKNRKKVL

SEQ ID NO: 32911 - protein, 40 aa, Artificial Sequence
  Quasi-synthetic sequence derived from human genome
RVFIKDMAPGKVVPMNCWGVYQAVRWLRWKASLIKLRALR

SEQ ID NO: 32912 - protein, 40 aa, Artificial Sequence
  Quasi-synthetic sequence derived from human genome
RTPMSWSRIKKILKEGPMLKNCNSFKRWKLRYFLVQGQKL

SEQ ID NO: 32913 - protein, 40 aa, Artificial Sequence
  Quasi-synthetic sequence derived from human genome
KKPFSQHVRKLRASITPGTILIILTGRHRGKRVVFLKQLA

SEQ ID NO: 32914 - protein, 40 aa, Artificial Sequence
  Quasi-synthetic sequence derived from human genome
LKHLCRLKIRRLMGLQKLCQPASVEKLPLPPAIQRYILFK

SEQ ID NO: 32915 - protein, 40 aa, Artificial Sequence
  Quasi-synthetic sequence derived from human genome
KKCILRWLARQKTCPCCRKEVKRKKVVHMNKLRKTIGRLE

SEQ ID NO: 32916 - protein, 40 aa, Artificial Sequence
  Quasi-synthetic sequence derived from human genome
LHNMMKKLFLQLIAEFKRLGSSVIYANFNRIILCTKKRRV

SEQ ID NO: 32917 - protein, 40 aa, Artificial Sequence
  Quasi-synthetic sequence derived from human genome
KVFRKKQVSQTKIRVISTILFILAGCIVFVTIPAVIFKYI

SEQ ID NO: 32918 - protein, 40 aa, Artificial Sequence
  Quasi-synthetic sequence derived from human genome
VVKKIALREIRMLKQLKHPNLVNLIEVFRRKRKMHLVFEY

SEQ ID NO: 32919 - protein, 40 aa, Artificial Sequence
  Quasi-synthetic sequence derived from human genome
LRLMRIFRILKLARHSTGLRSLGATLKYSYKEVGLLLLYL

SEQ ID NO: 32920 - protein, 40 aa, Artificial Sequence
  Quasi-synthetic sequence derived from human genome
MVRRTLLQAALRAWVIQCWWRSMQAKMLEQRRRLALRLYT

SEQ ID NO: 32921 - protein, 40 aa, Artificial Sequence
  Quasi-synthetic sequence derived from human genome
KKKYMPYNHQHKYFFLIGPPALLPLYFQWYIFYFVIQRKK

SEQ ID NO: 32922 - protein, 40 aa, Artificial Sequence
  Quasi-synthetic sequence derived from human genome
FLIVIVCYTLITKELYRSYVRTRGVGKVPRKKVNVKVFII

SEQ ID NO: 32923 - protein, 40 aa, Artificial Sequence
  Quasi-synthetic sequence derived from human genome
MLLRKRYRHRPCRLQFLLLLLMLGCVLMMVAMLHPPHHTL

SEQ ID NO: 32924 - protein, 40 aa, Artificial Sequence
  Quasi-synthetic sequence derived from human genome
LLHMTALSVERYLAICRPLRARVLVTRRRVRALIAVLWAV

SEQ ID NO: 32925 - protein, 40 aa, Artificial Sequence
  Quasi-synthetic sequence derived from human genome
RLIFHHLKRKAKSVVLVIVLGSLFFLVCHLVMKHTYINVW

SEQ ID NO: 32926 - protein, 40 aa, Artificial Sequence
  Quasi-synthetic sequence derived from human genome
KLLKSHRVLKWKADKSLSYNSRFWKNLLYLMPAKTVKPGR

SEQ ID NO: 32927 - protein, 40 aa, Artificial Sequence
  Quasi-synthetic sequence derived from human genome
RPLDTVQRPKGYRKLLALGTWLLALLLTLPVMLAMRLVRR

SEQ ID NO: 32928 - protein, 40 aa, Artificial Sequence
  Quasi-synthetic sequence derived from human genome
MRRMALSMIERRKRWRTIKLLLRRGADPNLCCVPMQVLFL

SEQ ID NO: 32929 - protein, 40 aa, Artificial Sequence
  Quasi-synthetic sequence derived from human genome
VLIWIHCFTVYLVPCSIFFILNSIIVYKLRRKSNFRLRGY

SEQ ID NO: 32930 - protein, 40 aa, Artificial Sequence
  Quasi-synthetic sequence derived from human genome
SPRTLMHLSRCAIRRTLHNRCHRAIPLLSLPLSLKKYLLL

SEQ ID NO: 32931 - protein, 40 aa, Artificial Sequence
  Quasi-synthetic sequence derived from human genome
LRYYYNKRILHKTKGKRFTYKFNFSKLIVVNYPLWEVRAP

SEQ ID NO: 32932 - protein, 40 aa, Artificial Sequence
  Quasi-synthetic sequence derived from human genome
YRFHKTRSHVTHRTPKVKKSPKVRKKSYLSRLMLANRLPF

SEQ ID NO: 32933 - protein, 40 aa, Artificial Sequence
  Quasi-synthetic sequence derived from human genome
RMAQTIMKARLKGAQTGRNLLKKKSDALTLRFRQILKKII

SEQ ID NO: 32934 - protein, 40 aa, Artificial Sequence
  Quasi-synthetic sequence derived from human genome
RLILPQMPKALFRKKVILEDKVKNFYTRLPFQKLMGISIR

SEQ ID NO: 32935 - protein, 40 aa, Artificial Sequence
  Quasi-synthetic sequence derived from human genome
LWLRLRGKGLAMLHVTRGVWGSRVRVWPLLPALLGPPRAL

SEQ ID NO: 32936 - protein, 40 aa, Artificial Sequence
  Quasi-synthetic sequence derived from human genome
KFMVLLWKNFILKRRRCIALVVEMVLTFLFSAALLATRSV

SEQ ID NO: 32937 - protein, 40 aa, Artificial Sequence
  Quasi-synthetic sequence derived from human genome
VLTKLCRKKPKARQFFLFNDILVYGNIVIQKKKYNKQHII

SEQ ID NO: 32938 - protein, 40 aa, Artificial Sequence
  Quasi-synthetic sequence derived from human genome
LKKKLFLTLKENEKLRKRLQAQRLVMRRMSSRLRACKGHQ

SEQ ID NO: 32939 - protein, 40 aa, Artificial Sequence
  Quasi-synthetic sequence derived from human genome
TFNITVTKELLKKINFHKITLRLWNTKDKMSRKVRYYRLK

SEQ ID NO: 32940 - protein, 40 aa, Artificial Sequence
  Quasi-synthetic sequence derived from human genome
LKLKVMDLRGKFKRPPLRRVRVSADAMLRALLGSKHKVSM

SEQ ID NO: 32941 - protein, 40 aa, Artificial Sequence
  Quasi-synthetic sequence derived from human genome
LRVLRALRILYVMRLARHSLGLQTLGLTVRRCTREFGLLL

SEQ ID NO: 32942 - protein, 40 aa, Artificial Sequence
  Quasi-synthetic sequence derived from human genome
RGRKNSRTMLLPLLRRFPEQVRVSLFHTPHLRGLLRLLIP

SEQ ID NO: 32943 - protein, 40 aa, Artificial Sequence
  Quasi-synthetic sequence derived from human genome
KKIIAYQQKLLNYFARNFYNMRMLALFVAFAINFILLFYK

SEQ ID NO: 32944 - protein, 40 aa, Artificial Sequence
  Quasi-synthetic sequence derived from human genome
RRERRYLQRRREKLMLARRGITLQKMEMPKQTRHRKLKVL

SEQ ID NO: 32945 - protein, 40 aa, Artificial Sequence
  Quasi-synthetic sequence derived from human genome
LLVIMVGKQVINNMQEVLIPKLKGWWQKFRLRSKKRKAGA

SEQ ID NO: 32946 - protein, 40 aa, Artificial Sequence
  Quasi-synthetic sequence derived from human genome
LSIFYLLKIANFSNLIFLHLKRRVKSVILVMLLGPLLFLA

SEQ ID NO: 32947 - protein, 40 aa, Artificial Sequence
  Quasi-synthetic sequence derived from human genome
LSIFYLLKIANFSNFIFLHLKRRVKSVILVMLLGPLLFLA

SEQ ID NO: 32948 - protein, 40 aa, Artificial Sequence
  Quasi-synthetic sequence derived from human genome
NIFYFLYGKTRSRIPLVRNRRFQLCRCMNPRARKNRSQIA

SEQ ID NO: 32949 - protein, 40 aa, Artificial Sequence
  Quasi-synthetic sequence derived from human genome
RRIRAAVVLQKHYRMQRARQAYQRVRRAAVVIQAFTRAMF

SEQ ID NO: 32950 - protein, 40 aa, Artificial Sequence
  Quasi-synthetic sequence derived from human genome
MLITVIIDNFNKHKIKLGGSNIFITVKQRKQYRRLKKLMY

SEQ ID NO: 32951 - protein, 40 aa, Artificial Sequence
  Quasi-synthetic sequence derived from human genome
LLRVLGKGGYGKVFQVRKVTGANTGKIFAMKVLKKAMIVR

SEQ ID NO: 32952 - protein, 40 aa, Artificial Sequence
  Quasi-synthetic sequence derived from human genome
LLRIFKVTKYWASLRNLVVSLLNSMKSIISLLFLLFLFIV

SEQ ID NO: 32953 - protein, 40 aa, Artificial Sequence
  Quasi-synthetic sequence derived from human genome
SRCFRSWRHLVKRQREPAAAAVALGRWQLLRKCLQALWLR

SEQ ID NO: 32954 - protein, 40 aa, Artificial Sequence
  Quasi-synthetic sequence derived from human genome
PKRRKKRYLRHDKPPYTYLAMIALVIQAAPSRRLKLAQII

SEQ ID NO: 32955 - protein, 40 aa, Artificial Sequence
  Quasi-synthetic sequence derived from human genome
ARTLMKMPNIKISRPLKVLLTVVIVFIVTQLPYNIVKFCR

SEQ ID NO: 32956 - protein, 40 aa, Artificial Sequence
  Quasi-synthetic sequence derived from human genome
GFMVFFLINPTKTFYYKSRFWLLKLLFRVFTAPFHKVGFA

SEQ ID NO: 32957 - protein, 40 aa, Artificial Sequence
  Quasi-synthetic sequence derived from human genome
LRGISGLRTFRVLRALKTVSVIPGLKVIVGALIHSVKKLA

SEQ ID NO: 32958 - protein, 40 aa, Artificial Sequence
  Quasi-synthetic sequence derived from human genome
LMILRLKSVRLLSGSREKDRNLRRITRLVLVVVAVFVVCW

SEQ ID NO: 32959 - protein, 40 aa, Artificial Sequence
  Quasi-synthetic sequence derived from human genome
VLKIKTASGRKKAFSTCASHLAVVLIFFGSIIFMYVRLKK

SEQ ID NO: 32960 - protein, 40 aa, Artificial Sequence
  Quasi-synthetic sequence derived from human genome
KNRYDKDKPVSFHKKKIFWSHRNSFPHLLYRLLFPRLMLL

SEQ ID NO: 32961 - protein, 40 aa, Artificial Sequence
  Quasi-synthetic sequence derived from human genome
RVTNIFPKQKYLSKKTTKRKRGYIKNKLVFKKGKKISKKT

SEQ ID NO: 32962 - protein, 40 aa, Artificial Sequence
  Quasi-synthetic sequence derived from human genome
RRTLLRHILVSDRYRFLYCYVPKVACSNWKRVMKVLAGVL

SEQ ID NO: 32963 - protein, 40 aa, Artificial Sequence
  Quasi-synthetic sequence derived from human genome
IFMFCYIKILHQLKRCQNHNKTKAIRLVLIVVIASLLFWV

SEQ ID NO: 32964 - protein, 40 aa, Artificial Sequence
  Quasi-synthetic sequence derived from human genome
KNPLLVPLLYDFRRMTARRRVNRKMGFHVIYKTPCGLCLR

SEQ ID NO: 32965 - protein, 40 aa, Artificial Sequence
  Quasi-synthetic sequence derived from human genome
LALAPRKPQPCRCRRRVRPSIRLLSPVLSLILLLIALELV

SEQ ID NO: 32966 - protein, 40 aa, Artificial Sequence
  Quasi-synthetic sequence derived from human genome
REIALFLILLATAVILGSAVLLFHFCIFHRRKMKAIRRSL

SEQ ID NO: 32967 - protein, 40 aa, Artificial Sequence
  Quasi-synthetic sequence derived from human genome
LLIYLRVATWNQILDPWVYILFRRAVLRRLQPRLSTRPRS

SEQ ID NO: 32968 - protein, 40 aa, Artificial Sequence
  Quasi-synthetic sequence derived from human genome
KPRTFIIKLIKWLMIAIPATFVNSAIRYLECKLALAFRTR

SEQ ID NO: 32969 - protein, 40 aa, Artificial Sequence
  Quasi-synthetic sequence derived from human genome
RARAWRRMSRSFQIHHRTSFRTRREWVLLGIQKRTIKVTV

SEQ ID NO: 32970 - protein, 40 aa, Artificial Sequence
  Quasi-synthetic sequence derived from human genome
RKAGWLFFKPLVTVQKERKLELVARRKWKQYWVTLKGCTL

SEQ ID NO: 32971 - protein, 40 aa, Artificial Sequence
  Quasi-synthetic sequence derived from human genome
LKSMVATKIAKYAVPDEILVVKRLPKTRSGKVMRRLLRKI

SEQ ID NO: 32972 - protein, 40 aa, Artificial Sequence
  Quasi-synthetic sequence derived from human genome
WRKYKLKTDLKRHQEREKAARIIQLAVINFLAKQRLRKRV

SEQ ID NO: 32973 - protein, 40 aa, Artificial Sequence
  Quasi-synthetic sequence derived from human genome
SLLKRRPYGRNKPLISRTMMKNILGHAFYQLIVIFILVFA

SEQ ID NO: 32974 - protein, 40 aa, Artificial Sequence
  Quasi-synthetic sequence derived from human genome
RLRVKAVTKIREFILQKIYSFRKPMTNYQIPQTALLKYRF

SEQ ID NO: 32975 - protein, 40 aa, Artificial Sequence
  Quasi-synthetic sequence derived from human genome
RSVPRTLLCLCRVAVRRALGKHRLHLIPSLPLPDPIKKFL

SEQ ID NO: 32976 - protein, 40 aa, Artificial Sequence
  Quasi-synthetic sequence derived from human genome
RYLTRRRRIEIANALCLTERQIKIWFQNRRMKWKKENKLI

SEQ ID NO: 32977 - protein, 40 aa, Artificial Sequence
  Quasi-synthetic sequence derived from human genome
KKRWSVLAAAGLRGLVRLLHVRAGFCCGVIRAHKKAIATL

SEQ ID NO: 32978 - protein, 40 aa, Artificial Sequence
  Quasi-synthetic sequence derived from human genome
QVRRILQRVPGKQRFGIYRFLPFFFVLGGTMEWIMIKVRV

SEQ ID NO: 32979 - protein, 40 aa, Artificial Sequence
  Quasi-synthetic sequence derived from human genome
FVVYLKRKTLIRLLFTNKKTTIEKLRCVRPSRPPRGFQPC

SEQ ID NO: 32980 - protein, 40 aa, Artificial Sequence
  Quasi-synthetic sequence derived from human genome
RYFSITRPLTYRAKRTPKRAGIMIGLAWLISFILWAPAIL

SEQ ID NO: 32981 - protein, 40 aa, Artificial Sequence
  Quasi-synthetic sequence derived from human genome
ALGYLGLSFSWVLLALALLAWCRRSRGLKALRLCRALALL

SEQ ID NO: 32982 - protein, 40 aa, Artificial Sequence
  Quasi-synthetic sequence derived from human genome
FLWHTYRWLLLKLLLLLLLLLLLALFLYSVPGYLVKKILG

SEQ ID NO: 32983 - protein, 40 aa, Artificial Sequence
  Quasi-synthetic sequence derived from human genome
LKWRVKKVVLVLLLVTSVFLFLNIALINIHINASINGYRR

SEQ ID NO: 32984 - protein, 40 aa, Artificial Sequence
  Quasi-synthetic sequence derived from human genome
LFLLLLLLGTIATIVFFCCWHRKLQKGRHPMKSVFSGRSR

SEQ ID NO: 32985 - protein, 40 aa, Artificial Sequence
  Quasi-synthetic sequence derived from human genome
LFMKICVFIFAFVIPVLIIIVCYTLMILRLKSVRLLSGSR

SEQ ID NO: 32986 - protein, 40 aa, Artificial Sequence
  Quasi-synthetic sequence derived from human genome
LCSPVTLGLLVAGVLVLLVSLGVAMHLCCRRRRARLRFMK

SEQ ID NO: 32987 - protein, 40 aa, Artificial Sequence
  Quasi-synthetic sequence derived from human genome
RLFHALFFKMAVTYSRLFPPAFRRLFEFFVLLKALFVLFV

SEQ ID NO: 32988 - protein, 40 aa, Artificial Sequence
  Quasi-synthetic sequence derived from human genome
YVEMKRKKRVHFHGFMLDVHKRIHRLKQSLPKRKPGFMAK

SEQ ID NO: 32989 - protein, 40 aa, Artificial Sequence
  Quasi-synthetic sequence derived from human genome
IVILYCRIYSLVRTRSRRLTFRKNISKASRSSEKSLALLK

SEQ ID NO: 32990 - protein, 40 aa, Artificial Sequence
  Quasi-synthetic sequence derived from human genome
IGLCYLLIVGKMRAVALRAGWQQRRRSEKKITRLVLMVVV

SEQ ID NO: 32991 - protein, 40 aa, Artificial Sequence
  Quasi-synthetic sequence derived from human genome
RFQAAPVPLLLMILKPVQKLFAIIVGRGIRKWWQALPPNK

SEQ ID NO: 32992 - protein, 40 aa, Artificial Sequence
  Quasi-synthetic sequence derived from human genome
RARVSYRLLGVISLLHLVLSMGLQLYGFRQRQRARKEWRL

SEQ ID NO: 32993 - protein, 40 aa, Artificial Sequence
  Quasi-synthetic sequence derived from human genome
RKRRAAIPVPKLSCKNLCHRHQLFINFRDLGWHKWIIAPK

SEQ ID NO: 32994 - protein, 40 aa, Artificial Sequence
  Quasi-synthetic sequence derived from human genome
YLLPFGALRPLSRVGWRPVSRVALYKSVPTRLLSRAWGRL

SEQ ID NO: 32995 - protein, 40 aa, Artificial Sequence
  Quasi-synthetic sequence derived from human genome
LRTLRAVRVLRPLKLVSGIPSLQIVLKSIMKAMVPLLQIG

SEQ ID NO: 32996 - protein, 40 aa, Artificial Sequence
  Quasi-synthetic sequence derived from human genome
RVVQKRPKRIRLSRWEQFYVMPLPRITDQYRPKWRIPKLS

SEQ ID NO: 32997 - protein, 40 aa, Artificial Sequence
  Quasi-synthetic sequence derived from human genome
IRKLIKDGLIIRKPVTVHSRARCRKNTLARRKGRHMGIGK

SEQ ID NO: 32998 - protein, 40 aa, Artificial Sequence
  Quasi-synthetic sequence derived from human genome
TPIKYLRKSLKIIYLNSIQELEIRNMSWPRLIRKLRCYLK

SEQ ID NO: 32999 - protein, 40 aa, Artificial Sequence
  Quasi-synthetic sequence derived from human genome
LWSAVKSRWVIVGLFVSILILSLVFASRLRPASRAPLLFR

SEQ ID NO: 33000 - protein, 40 aa, Artificial Sequence
  Quasi-synthetic sequence derived from human genome
LTLLFATSIAGPGLLIGLLYARLARAYRRSQRASFKRARR

SEQ ID NO: 33001 - protein, 41 aa, Artificial Sequence
  Quasi-synthetic sequence derived from human genome
IRIFKRKKRIKRRALLFLSYILTHFIFLALLLILIVLLRHT

SEQ ID NO: 33002 - protein, 41 aa, Artificial Sequence
  Quasi-synthetic sequence derived from human genome
KGLLIFLLLVILAMGLWVIRVQKRHKMPRMKKLMRNRMKLR

SEQ ID NO: 33003 - protein, 41 aa, Artificial Sequence
  Quasi-synthetic sequence derived from human genome
KLLRNIPRWTHLLRLLRLIILLRIFHLFHQKRQLEKLIRRR

SEQ ID NO: 33004 - protein, 41 aa, Artificial Sequence
  Quasi-synthetic sequence derived from human genome
PPPKRKKKKKFCYLCILLLIVLFILLCCLYRLCKKSKPIKK

SEQ ID NO: 33005 - protein, 41 aa, Artificial Sequence
  Quasi-synthetic sequence derived from human genome
RLIPIIVLLLQKAWRGTLARWRCRRLRAIYTIMRWFRRHKV

SEQ ID NO: 33006 - protein, 41 aa, Artificial Sequence
  Quasi-synthetic sequence derived from human genome
CRSTWLRVRKARPQLILSRRPRRRLGSLRWCGRRRLRWRLL

SEQ ID NO: 33007 - protein, 41 aa, Artificial Sequence
  Quasi-synthetic sequence derived from human genome
RIAGVKRFLKHAGKWSLRWFLSPRWILQFRRWARKWSRFTR

SEQ ID NO: 33008 - protein, 41 aa, Artificial Sequence
  Quasi-synthetic sequence derived from human genome
KLLRNIPRWTHLVRLLRLIILIRIFHLLHQKRQLEKLMRRL

SEQ ID NO: 33009 - protein, 41 aa, Artificial Sequence
  Quasi-synthetic sequence derived from human genome
FRIYAVSTLLLFLLFFLFRLLLRFLRLCRSFYITCRRLRCF

SEQ ID NO: 33010 - protein, 41 aa, Artificial Sequence
  Quasi-synthetic sequence derived from human genome
MLIRIVLFLQKVWRGTLARMRYKRTKAALTIIRYYRRYKVK

SEQ ID NO: 33011 - protein, 41 aa, Artificial Sequence
  Quasi-synthetic sequence derived from human genome
RLLKRLLGPKLRRFLKPQGHPRLLLWFKRGLALAAFLGLVL

SEQ ID NO: 33012 - protein, 41 aa, Artificial Sequence
  Quasi-synthetic sequence derived from human genome
KKKKKRYLRASSNRNFLLTMRPFLKRAILVLSYVLVILYFR

SEQ ID NO: 33013 - protein, 41 aa, Artificial Sequence
  Quasi-synthetic sequence derived from human genome
RSRIPLLRKRWFQLGRSMNPRARKKRSRIPLLRKRRFQLGR

SEQ ID NO: 33014 - protein, 41 aa, Artificial Sequence
  Quasi-synthetic sequence derived from human genome
NVRMPFRRKIYYLPRRYKFMSRIDKQISRFRRWLPKKPMRL

SEQ ID NO: 33015 - protein, 41 aa, Artificial Sequence
  Quasi-synthetic sequence derived from human genome
FFIKRRFRSLRHKIILLQSRARGYLARQRYQQMRRSLVKFR

SEQ ID NO: 33016 - protein, 41 aa, Artificial Sequence
  Quasi-synthetic sequence derived from human genome
QKYWRMYVVRRRYKIRRAATIVLQSYLRGFLARNRYRKILR

SEQ ID NO: 33017 - protein, 41 aa, Artificial Sequence
  Quasi-synthetic sequence derived from human genome
KLLVHSLNLLAKQGLRLLRGLRRRNVQKKVALAKKLLAKLR

SEQ ID NO: 33018 - protein, 41 aa, Artificial Sequence
  Quasi-synthetic sequence derived from human genome
PFIVTLLVYIKIYIVLRRRRKRVNTKRSSRAFRAHLRAPLK

SEQ ID NO: 33019 - protein, 41 aa, Artificial Sequence
  Quasi-synthetic sequence derived from human genome
RKQYRKVLYCVVIIQKNYRAFLLRRRFLHLKKAAIVFQKQL

SEQ ID NO: 33020 - protein, 41 aa, Artificial Sequence
  Quasi-synthetic sequence derived from human genome
RRLLLALHRRLRGLRRAAAGTSRLLFQRLLPCGVIKFRYIW

SEQ ID NO: 33021 - protein, 41 aa, Artificial Sequence
  Quasi-synthetic sequence derived from human genome
AISKSKLSRRWRRWNRFNRRRCRAAVKSVTFYWLVIVLVFL

SEQ ID NO: 33022 - protein, 41 aa, Artificial Sequence
  Quasi-synthetic sequence derived from human genome
RIPLLRKRRFQLYRSMNPRARKNRSHIPLVRKRRFQLRRCM

SEQ ID NO: 33023 - protein, 41 aa, Artificial Sequence
  Quasi-synthetic sequence derived from human genome
LLLGPARLCLRLLLLLGYRRRCPPLLRGLVQRWRYGKVCLR

SEQ ID NO: 33024 - protein, 41 aa, Artificial Sequence
  Quasi-synthetic sequence derived from human genome
WRGVLVRRTLLVAALRAWMIQCWWRTLVQRRIRQRRQALLR

SEQ ID NO: 33025 - protein, 41 aa, Artificial Sequence
  Quasi-synthetic sequence derived from human genome
KIMKTRVCRRLRRANRVLRARCRRAVKSNACYWAVLLLVFL

SEQ ID NO: 33026 - protein, 41 aa, Artificial Sequence
  Quasi-synthetic sequence derived from human genome
KKRSRIPLLRKRRFQLGRSMNPRARKNRSRIPLLRKRRFQL

SEQ ID NO: 33027 - protein, 41 aa, Artificial Sequence
  Quasi-synthetic sequence derived from human genome
RSLLVRRRFISLKKATIFVQRKYRATICAKHKLYQFLHLRK

SEQ ID NO: 33028 - protein, 41 aa, Artificial Sequence
  Quasi-synthetic sequence derived from human genome
RSRIPLLRKRRFQLYRSTNPRARKNRSRIPLLRKRRFQLYR

SEQ ID NO: 33029 - protein, 41 aa, Artificial Sequence
  Quasi-synthetic sequence derived from human genome
RMPFRRKIYYLPRRYKFMSRIDKQISRFRRWLPKKPMRLDK

SEQ ID NO: 33030 - protein, 41 aa, Artificial Sequence
  Quasi-synthetic sequence derived from human genome
KRALGRRKGVWLRLRKILFCVLGLYIAIPFLIKLCPGIQAK

SEQ ID NO: 33031 - protein, 41 aa, Artificial Sequence
  Quasi-synthetic sequence derived from human genome
RSRIPLLRKRWFQLGHSMNPRARKNRSRIPLLRKRRFQLYR

SEQ ID NO: 33032 - protein, 41 aa, Artificial Sequence
  Quasi-synthetic sequence derived from human genome
ITIKLLPLRTFRVFRALKAISVVSRLKVIVGALLRSVKKLV

SEQ ID NO: 33033 - protein, 41 aa, Artificial Sequence
  Quasi-synthetic sequence derived from human genome
MNNRTGRRKSWRLEFLFLRRRCFLLTFYLWFLFFSRFLLML

SEQ ID NO: 33034 - protein, 41 aa, Artificial Sequence
  Quasi-synthetic sequence derived from human genome
RKTVKAVIDRFLRLHCGLWVRRKAGYKKKLWKKTPARKKRL

SEQ ID NO: 33035 - protein, 41 aa, Artificial Sequence
  Quasi-synthetic sequence derived from human genome
WKCYKARKFFLFYRQQKWASGVIAIAWLLYCHKTRLKKILK

SEQ ID NO: 33036 - protein, 41 aa, Artificial Sequence
  Quasi-synthetic sequence derived from human genome
IQRRFRTLMMRRRFLSLKKTAILIQRKYRAHLCTKHHLQFL

SEQ ID NO: 33037 - protein, 41 aa, Artificial Sequence
  Quasi-synthetic sequence derived from human genome
NVLKIRRRKMNHHKYRKLVKKTRFLRRKVQEGRLRRKQIKF

SEQ ID NO: 33038 - protein, 41 aa, Artificial Sequence
  Quasi-synthetic sequence derived from human genome
RLRRVIAAFYFPKREKKRILFLYNDLLKKRAAFTKLRRAAI

SEQ ID NO: 33039 - protein, 41 aa, Artificial Sequence
  Quasi-synthetic sequence derived from human genome
IIQKYFFSPTLFRVIRLARIGRILRLIRGAKGIRTLLFALM

SEQ ID NO: 33040 - protein, 41 aa, Artificial Sequence
  Quasi-synthetic sequence derived from human genome
NFFLIAVRLASLNQILDPWVYLLLRKILLRKFCQMRKRRLR

SEQ ID NO: 33041 - protein, 41 aa, Artificial Sequence
  Quasi-synthetic sequence derived from human genome
RSRIPLLRKRRFQLGRSMNLRARKNRSQIVLFQKRRFQFFC

SEQ ID NO: 33042 - protein, 41 aa, Artificial Sequence
  Quasi-synthetic sequence derived from human genome
ILIPTILGLFLLALLGLVVKRAVERRKALSRRARRLAVRMR

SEQ ID NO: 33043 - protein, 41 aa, Artificial Sequence
  Quasi-synthetic sequence derived from human genome
KYRRRPALGWLARLLRSRAGSRKRPLTLLQRAGLLLLLGLL

SEQ ID NO: 33044 - protein, 41 aa, Artificial Sequence
  Quasi-synthetic sequence derived from human genome
KAKRCNRRLKSQILLKKYLMKRRWKKNFIAVSAANRFKKIS

SEQ ID NO: 33045 - protein, 41 aa, Artificial Sequence
  Quasi-synthetic sequence derived from human genome
KLSGRLGLLGRRGFSGRLGGYWKTWIFWKTWIFWKTWIFRK

SEQ ID NO: 33046 - protein, 41 aa, Artificial Sequence
  Quasi-synthetic sequence derived from human genome
RSRIPLLRKRRFQLCRCMNPRARKNRSQIVLFQKLRFQFFC

SEQ ID NO: 33047 - protein, 41 aa, Artificial Sequence
  Quasi-synthetic sequence derived from human genome
VLTFLGHRLLKRLLGPKLRRFLKPQGHPRLLLWFKRDPRPW

SEQ ID NO: 33048 - protein, 41 aa, Artificial Sequence
  Quasi-synthetic sequence derived from human genome
LFLVQKKPLIFLGCCFFSTLVLLLSIAIFQRQKRRKFWKAK

SEQ ID NO: 33049 - protein, 41 aa, Artificial Sequence
  Quasi-synthetic sequence derived from human genome
RSRIPLLRKRRFQLYRSTNPRARKNRSRIPLLRKHRFQLYR

SEQ ID NO: 33050 - protein, 41 aa, Artificial Sequence
  Quasi-synthetic sequence derived from human genome
NRSKQLRRQMWWRGCKIKAIMALVAAILLLVIIILIVMKYR

SEQ ID NO: 33051 - protein, 41 aa, Artificial Sequence
  Quasi-synthetic sequence derived from human genome
WWRGMLVRRTLLHAALRAWIIQCWWRQVLEKLLAKRRRMVL

SEQ ID NO: 33052 - protein, 41 aa, Artificial Sequence
  Quasi-synthetic sequence derived from human genome
KIQAWWRGTLVRRALLHAALSACIIQCWWRLILSKILKKRR

SEQ ID NO: 33053 - protein, 41 aa, Artificial Sequence
  Quasi-synthetic sequence derived from human genome
PIYFANIGFFRRKLIDAVGFSPLRILRKRNKALRKIRKLQK

SEQ ID NO: 33054 - protein, 41 aa, Artificial Sequence
  Quasi-synthetic sequence derived from human genome
KVLFKKTHRILRRLFNLCKRCHRQPRFRLPKERSLSYWWNR

SEQ ID NO: 33055 - protein, 41 aa, Artificial Sequence
  Quasi-synthetic sequence derived from human genome
RSRIPLLRKRRFQLYRSMNSRARKNRSQIVLFQKRRFHFFC

SEQ ID NO: 33056 - protein, 41 aa, Artificial Sequence
  Quasi-synthetic sequence derived from human genome
KKIWWIIRGPMMLCVTVNFFIFLKILKLLISKLKAHQMCFR

SEQ ID NO: 33057 - protein, 41 aa, Artificial Sequence
  Quasi-synthetic sequence derived from human genome
ALRRKKKKTIKMLMLVVVLFALCWFPLNCYVLLLSSKVIRT

SEQ ID NO: 33058 - protein, 41 aa, Artificial Sequence
  Quasi-synthetic sequence derived from human genome
MKIFKCYFKHTLQQKVFILFLTLWLLSLLKLLNVRRLFPQK

SEQ ID NO: 33059 - protein, 41 aa, Artificial Sequence
  Quasi-synthetic sequence derived from human genome
LKKKRRNFAELKIKRLRKKFAQKMLRKARRKLIYEKAKHYH

SEQ ID NO: 33060 - protein, 41 aa, Artificial Sequence
  Quasi-synthetic sequence derived from human genome
LQKKIIQKHFEKKKDIRRGIGYLKLICFLIPFLLSLKKKMK

SEQ ID NO: 33061 - protein, 41 aa, Artificial Sequence
  Quasi-synthetic sequence derived from human genome
AARVARWRRLRLQQLRRLRGLLRVLRGRPGAGSRRRGRMAL

SEQ ID NO: 33062 - protein, 41 aa, Artificial Sequence
  Quasi-synthetic sequence derived from human genome
LGVLLRRVTRNLVRNKLAVITRLLQNLIMGLFLLFFVLRVR

SEQ ID NO: 33063 - protein, 41 aa, Artificial Sequence
  Quasi-synthetic sequence derived from human genome
RAYRRSQRASFKRARRPGARALRLVLGIVLLFWACFLPFWL

SEQ ID NO: 33064 - protein, 41 aa, Artificial Sequence
  Quasi-synthetic sequence derived from human genome
LGRRKGVWLRLRKILFCVLGLYIAIPFLIKLCPGIQAKLIF

SEQ ID NO: 33065 - protein, 41 aa, Artificial Sequence
  Quasi-synthetic sequence derived from human genome
RSHIPLVRKRRFQLRRCMNPRARKNRSQIVLFQKRRFHFFC

SEQ ID NO: 33066 - protein, 41 aa, Artificial Sequence
  Quasi-synthetic sequence derived from human genome
RSRIPLLRKPWFQLGHSMNPRARKNRSRIPLLRKRRFQLYR

SEQ ID NO: 33067 - protein, 41 aa, Artificial Sequence
  Quasi-synthetic sequence derived from human genome
RYVRGYQARCYAKFLRRTKAATIIQKYWRMYVVRRRYKIRR

SEQ ID NO: 33068 - protein, 41 aa, Artificial Sequence
  Quasi-synthetic sequence derived from human genome
MRRLRRLAHLVLFCPFSKRLQGRLPGLRVRCIFLAWLGVFA

SEQ ID NO: 33069 - protein, 41 aa, Artificial Sequence
  Quasi-synthetic sequence derived from human genome
AMRRIRYEFKAKNIKKKKVSIMVSVDGVKVILKKKKKLLLL

SEQ ID NO: 33070 - protein, 41 aa, Artificial Sequence
  Quasi-synthetic sequence derived from human genome
VLILFMFRRLRQFRQAQPTPQYRFRKRDKVMFYGRKIMRKV

SEQ ID NO: 33071 - protein, 41 aa, Artificial Sequence
  Quasi-synthetic sequence derived from human genome
AKLLKKRSKQPLGEVKRRLSLYLTKIHFWLPVLKMIRKKQM

SEQ ID NO: 33072 - protein, 41 aa, Artificial Sequence
  Quasi-synthetic sequence derived from human genome
HLVRLLRLIILIRIFHLLHQKRQLEKLMRRLVSENKRRYTR

SEQ ID NO: 33073 - protein, 41 aa, Artificial Sequence
  Quasi-synthetic sequence derived from human genome
VVFKSAPILKRALKVKQAMLQLYVLKLLKLQTKYLGRQWRK

SEQ ID NO: 33074 - protein, 41 aa, Artificial Sequence
  Quasi-synthetic sequence derived from human genome
MSLKLTCSAFRLQRALRFLLGRLPWRVASGARRFRRWLNRY

SEQ ID NO: 33075 - protein, 41 aa, Artificial Sequence
  Quasi-synthetic sequence derived from human genome
RRRNTPFHERFFRFLLRKLYVFRRSFLMTCISLRNLILGRP

SEQ ID NO: 33076 - protein, 41 aa, Artificial Sequence
  Quasi-synthetic sequence derived from human genome
KFFLLKRFNKEKLGLLLLTFLGIVAAVLVKKYQAVLRRKAL

SEQ ID NO: 33077 - protein, 41 aa, Artificial Sequence
  Quasi-synthetic sequence derived from human genome
LFVYLNRKIVQVMRKQKTINRFLMRKRLLFPALVTLLISTL

SEQ ID NO: 33078 - protein, 41 aa, Artificial Sequence
  Quasi-synthetic sequence derived from human genome
LPRRRGRPSRRFLGKKYRKYYYKSPKPLLRPFLCRICGSRF

SEQ ID NO: 33079 - protein, 41 aa, Artificial Sequence
  Quasi-synthetic sequence derived from human genome
TLKTYLKRFKVMKPKVLRSWCRQILKGLLFLHTRTPPIIHR

SEQ ID NO: 33080 - protein, 41 aa, Artificial Sequence
  Quasi-synthetic sequence derived from human genome
IPTILGLFLLALLGLVVKRAVERRKALSRRARRLAVRMRAL

SEQ ID NO: 33081 - protein, 41 aa, Artificial Sequence
  Quasi-synthetic sequence derived from human genome
PLIYPCSSREFKRAFLRLLRCQCRRRRRRRPLWRVYGHHWR

SEQ ID NO: 33082 - protein, 41 aa, Artificial Sequence
  Quasi-synthetic sequence derived from human genome
RMRILRRLLRRYRESKKIDRHMYHSLYLKVKGNVFKNKRIL

SEQ ID NO: 33083 - protein, 41 aa, Artificial Sequence
  Quasi-synthetic sequence derived from human genome
RKYKKNIKALYIVHPTMFIKTLLILFKPLISFKFGQKIFYV

SEQ ID NO: 33084 - protein, 41 aa, Artificial Sequence
  Quasi-synthetic sequence derived from human genome
LLRICRVLRSLKLLAQFRQIQIIILVLVRALKSMTFLLMLL

SEQ ID NO: 33085 - protein, 41 aa, Artificial Sequence
  Quasi-synthetic sequence derived from human genome
HRRIKLSPLMMYEKLSMIRFRYRILRSQHFRTKSKVCKLRK

SEQ ID NO: 33086 - protein, 41 aa, Artificial Sequence
  Quasi-synthetic sequence derived from human genome
RLPVKKIRKQMKLLLLLLLLSCAAWLTYVHLGLVRQGRALR

SEQ ID NO: 33087 - protein, 41 aa, Artificial Sequence
  Quasi-synthetic sequence derived from human genome
LFLFFFVLFLCLFFYNCYKGYLPRQCLKFRSALLIGKKKPK

SEQ ID NO: 33088 - protein, 41 aa, Artificial Sequence
  Quasi-synthetic sequence derived from human genome
LRADKLRAACIRIQKTIRGWLLRKKYLRMRKAAITMQRYVR

SEQ ID NO: 33089 - protein, 41 aa, Artificial Sequence
  Quasi-synthetic sequence derived from human genome
VGWRILKVLLWLLAILTGLIAGKFLFHQRLFGQLLRLKMFR

SEQ ID NO: 33090 - protein, 41 aa, Artificial Sequence
  Quasi-synthetic sequence derived from human genome
LSRILKSPEIQRALRAPRKKIHRRVLKKNPLKNLRIMLKLN

SEQ ID NO: 33091 - protein, 41 aa, Artificial Sequence
  Quasi-synthetic sequence derived from human genome
FVRQIQLLLWKNWTLRKRQKIRFVVELVWPLSLFLVLIWLR

SEQ ID NO: 33092 - protein, 41 aa, Artificial Sequence
  Quasi-synthetic sequence derived from human genome
RHSVIYIQAIFRGKKARRHLKMMHIAATLIQRRFRTLMMRR

SEQ ID NO: 33093 - protein, 41 aa, Artificial Sequence
  Quasi-synthetic sequence derived from human genome
TLFRVIRLARIGRILRLIRAAKGIRTLLFALMMSLPALFNI

SEQ ID NO: 33094 - protein, 41 aa, Artificial Sequence
  Quasi-synthetic sequence derived from human genome
RLRELRIRCVARKFLYLWIRMTFGRVFPSKARFYYEQRLLR

SEQ ID NO: 33095 - protein, 41 aa, Artificial Sequence
  Quasi-synthetic sequence derived from human genome
RLKNIRKVYGRCMWYRLRLLKPQPNIIPTVKKIVLLAGWAL

SEQ ID NO: 33096 - protein, 41 aa, Artificial Sequence
  Quasi-synthetic sequence derived from human genome
TFKERLKLFFIKNQRSSLRIRLFNFSLKLLSCLLYIIRVLL

SEQ ID NO: 33097 - protein, 41 aa, Artificial Sequence
  Quasi-synthetic sequence derived from human genome
IRTPILMTILINFLIFIRILGILLSKLRTRQMRCRDYRLRL

SEQ ID NO: 33098 - protein, 41 aa, Artificial Sequence
  Quasi-synthetic sequence derived from human genome
SLKHLCRLKIRKCMGRLHLRCPVFMSFLPLPNRLKAYVLYK

SEQ ID NO: 33099 - protein, 41 aa, Artificial Sequence
  Quasi-synthetic sequence derived from human genome
PKLNRFLLLFIGFVCVLLSFFMARVFMRMKLPRSLALLPRL

SEQ ID NO: 33100 - protein, 41 aa, Artificial Sequence
  Quasi-synthetic sequence derived from human genome
FQKTRRWRGLGSLFRRACCVALPLQLLLLLFLLLLFLLPIR

SEQ ID NO: 33101 - protein, 41 aa, Artificial Sequence
  Quasi-synthetic sequence derived from human genome
KAKQRLKRLRNIHYLFNTALFLIAWRLLIARSQMARNVWFF

SEQ ID NO: 33102 - protein, 41 aa, Artificial Sequence
  Quasi-synthetic sequence derived from human genome
VLVLRGNTKINTFNWAKIRKLSFKRKHFLIKLHANILVLCK

SEQ ID NO: 33103 - protein, 41 aa, Artificial Sequence
  Quasi-synthetic sequence derived from human genome
MAGIRNIGIWFFWIRLYKIRRGRTRPQALLFLCMILLLIVL

SEQ ID NO: 33104 - protein, 41 aa, Artificial Sequence
  Quasi-synthetic sequence derived from human genome
MAHLKRLVKLHIKRHYHKKFWKLGAVIFFFIIVLVLMQREV

SEQ ID NO: 33105 - protein, 41 aa, Artificial Sequence
  Quasi-synthetic sequence derived from human genome
TLFRVIRLARIGRILRLIRGAKGIRTLLFALMMSLPALFNI

SEQ ID NO: 33106 - protein, 41 aa, Artificial Sequence
  Quasi-synthetic sequence derived from human genome
FLRVKRSAICIQSWWRGTLGRRKAAKRKWAAQTIRRLIRGF

SEQ ID NO: 33107 - protein, 41 aa, Artificial Sequence
  Quasi-synthetic sequence derived from human genome
LLPLRMPLSRWQRRLRRAARRQVLSGHLPFCRFRLRYPSLS

SEQ ID NO: 33108 - protein, 41 aa, Artificial Sequence
  Quasi-synthetic sequence derived from human genome
KQMRARRKTAKMLMVVLLVFALCYLPISVLNVLKRVFGMFR

SEQ ID NO: 33109 - protein, 41 aa, Artificial Sequence
  Quasi-synthetic sequence derived from human genome
RSRIPLLRKHRFQLYRSMNSRARKNRSQIVLFQKRRFHFFC

SEQ ID NO: 33110 - protein, 41 aa, Artificial Sequence
  Quasi-synthetic sequence derived from human genome
FFSILTVRSALFALRYNILTLMRMLSLKSLKKQMKKVKKMT

SEQ ID NO: 33111 - protein, 41 aa, Artificial Sequence
  Quasi-synthetic sequence derived from human genome
TFKERLKLFFIKNQRSSLRIRLFNFSLKLLTCLLYIVRVLL

SEQ ID NO: 33112 - protein, 41 aa, Artificial Sequence
  Quasi-synthetic sequence derived from human genome
LILLVVRRLRVPKTPAPDGPRYRFRKRDKVLFYGRKIMRKV

SEQ ID NO: 33113 - protein, 41 aa, Artificial Sequence
  Quasi-synthetic sequence derived from human genome
RTPLIAAGVIGGLFILVIVGLTFAVYVRRKSIKKKRALRRF

SEQ ID NO: 33114 - protein, 41 aa, Artificial Sequence
  Quasi-synthetic sequence derived from human genome
TLFRVIRLARIGRILRLIKGAKGIRTLLFALMMSLPALFNI

SEQ ID NO: 33115 - protein, 41 aa, Artificial Sequence
  Quasi-synthetic sequence derived from human genome
LPVAVLVALLAVIVLVALLLLWRRRQKRRTGALVLSRGGKR

SEQ ID NO: 33116 - protein, 41 aa, Artificial Sequence
  Quasi-synthetic sequence derived from human genome
IKQIRARRKTARMLMIVLLVFAICYLPISILNVLKRVFGMF

SEQ ID NO: 33117 - protein, 41 aa, Artificial Sequence
  Quasi-synthetic sequence derived from human genome
PFRLTRWRTRYKTIRINLGLWAASFILALPVWVYSKVIKFK

SEQ ID NO: 33118 - protein, 41 aa, Artificial Sequence
  Quasi-synthetic sequence derived from human genome
LRIIRFLPLFKIIVPILIRIADVQIKKRLSLMYSITKGYIK

SEQ ID NO: 33119 - protein, 41 aa, Artificial Sequence
  Quasi-synthetic sequence derived from human genome
RRVLKKNPLKNLRIMLKLNPYAKTMRRNTILRQARNHKLRV

SEQ ID NO: 33120 - protein, 41 aa, Artificial Sequence
  Quasi-synthetic sequence derived from human genome
IIRKYISKYSVFLRHRYQSRSAFLGRYLKKKKSVVSRLKKA

SEQ ID NO: 33121 - protein, 41 aa, Artificial Sequence
  Quasi-synthetic sequence derived from human genome
RWKKVQWCSLSVIKLKNKIKYRAEACIKMQKTIRMWLCKRR

SEQ ID NO: 33122 - protein, 41 aa, Artificial Sequence
  Quasi-synthetic sequence derived from human genome
FKLLILLIGTWALFFRKRRADMPRVFVFRALLLVLIFLFVV

SEQ ID NO: 33123 - protein, 41 aa, Artificial Sequence
  Quasi-synthetic sequence derived from human genome
KLFMRMASKQLRENVLVKRKRTKGKKLLLSIGVLLHKWKNV

SEQ ID NO: 33124 - protein, 41 aa, Artificial Sequence
  Quasi-synthetic sequence derived from human genome
TLFRIVRLARIGRILRLVRAARGIRTLLFALMMSLPSLFNI

SEQ ID NO: 33125 - protein, 41 aa, Artificial Sequence
  Quasi-synthetic sequence derived from human genome
PLVYALASRHFRARFRRLWPCGRRRRHRARRALRRVRPASS

SEQ ID NO: 33126 - protein, 41 aa, Artificial Sequence
  Quasi-synthetic sequence derived from human genome
KVRVSYQKLLKYYVLNALKHRPPKAQKKRYLFRSFKATKFF

SEQ ID NO: 33127 - protein, 41 aa, Artificial Sequence
  Quasi-synthetic sequence derived from human genome
KIPSIATGMVGALLLLLVVALGIGLFMRRRHIVRKRTLRRL

SEQ ID NO: 33128 - protein, 41 aa, Artificial Sequence
  Quasi-synthetic sequence derived from human genome
PKPKLSKFILISSLAILLMVSLLLLSLWKLWRVKKFLIPSV

SEQ ID NO: 33129 - protein, 41 aa, Artificial Sequence
  Quasi-synthetic sequence derived from human genome
MCHKCKKKQKSTKKFWIQKLPKVLCLHLKRFHWTAYLRNKV

SEQ ID NO: 33130 - protein, 41 aa, Artificial Sequence
  Quasi-synthetic sequence derived from human genome
GKLVSPKWKNFKGLKLLCRDKIRLNNAIWRAWYIQYVKRRK

SEQ ID NO: 33131 - protein, 41 aa, Artificial Sequence
  Quasi-synthetic sequence derived from human genome
VVFKSAPILKRALKVKQAMMQLYVLKLLKVQTKYLGRQWRK

SEQ ID NO: 33132 - protein, 41 aa, Artificial Sequence
  Quasi-synthetic sequence derived from human genome
FCLKLLLPGLLLLLVVIILILAFWVLPKYKTRKAMRNNVPR

SEQ ID NO: 33133 - protein, 41 aa, Artificial Sequence
  Quasi-synthetic sequence derived from human genome
TLFRVIRLARIGRVLRLIRGAKGIRTLLFALMMSLPALFNI

SEQ ID NO: 33134 - protein, 41 aa, Artificial Sequence
  Quasi-synthetic sequence derived from human genome
AALAVIRGGATRAAGVFYPWRFRLLCLLRRWLPRPRAWFIR

SEQ ID NO: 33135 - protein, 41 aa, Artificial Sequence
  Quasi-synthetic sequence derived from human genome
KWLKVYKSIYFLGHIFFLSLLFILPYIHKAMVPRKEKLKKM

SEQ ID NO: 33136 - protein, 41 aa, Artificial Sequence
  Quasi-synthetic sequence derived from human genome
KLLRFFYSLFFPGLIVCGTLCVCLVIVLWGIRLLLQRKKKL

SEQ ID NO: 33137 - protein, 41 aa, Artificial Sequence
  Quasi-synthetic sequence derived from human genome
LQRAGVTLRVLRMMRIFWVIKLARHFIGLQTLGLTLKRCYR

SEQ ID NO: 33138 - protein, 41 aa, Artificial Sequence
  Quasi-synthetic sequence derived from human genome
TLFRVIRLARIGRILRLVKGAKGIRTLLFALMMSLPALFNI

SEQ ID NO: 33139 - protein, 41 aa, Artificial Sequence
  Quasi-synthetic sequence derived from human genome
FCWRNLFSCINLLRLLNKLTKWKHSRTMMLVVFKSAPILKR

SEQ ID NO: 33140 - protein, 41 aa, Artificial Sequence
  Quasi-synthetic sequence derived from human genome
RSIAIIVPLVLLVTLITTLVIGLVLCKRKRRTKTIRRQPII

SEQ ID NO: 33141 - protein, 41 aa, Artificial Sequence
  Quasi-synthetic sequence derived from human genome
FLKRATLKNLRKQYRNVKKMTAKELVKVLFSFFWMLFVGLF

SEQ ID NO: 33142 - protein, 41 aa, Artificial Sequence
  Quasi-synthetic sequence derived from human genome
RRRRAMRAFRMLLYSKSTSLTFHWKLWGRHRGRRRGLAHPK

SEQ ID NO: 33143 - protein, 41 aa, Artificial Sequence
  Quasi-synthetic sequence derived from human genome
WRRYRAKKYLCKVKAACKIQAWYRCWRAHKEYLAILKAVKI

SEQ ID NO: 33144 - protein, 41 aa, Artificial Sequence
  Quasi-synthetic sequence derived from human genome
FCWRNLFSCINLLRILNKLTKWKHSRTMMLVVFKSAPILKR

SEQ ID NO: 33145 - protein, 41 aa, Artificial Sequence
  Quasi-synthetic sequence derived from human genome
KQFVWYTPPTFMIAVFLPIVVLIFKSILFLPCLRKKILKIR

SEQ ID NO: 33146 - protein, 41 aa, Artificial Sequence
  Quasi-synthetic sequence derived from human genome
LLVLLALAAWASRWLRRKLRARRKGGAPVHVRHMYSTRRPL

SEQ ID NO: 33147 - protein, 41 aa, Artificial Sequence
  Quasi-synthetic sequence derived from human genome
FLRLQALHRSRKLHQQYRLARQRIIQFQARCRAYLVRKAFR

SEQ ID NO: 33148 - protein, 41 aa, Artificial Sequence
  Quasi-synthetic sequence derived from human genome
LRVLRVLRPLKTIKRLPKLKAVFDCVVTSLKNVFNILIVYK

SEQ ID NO: 33149 - protein, 41 aa, Artificial Sequence
  Quasi-synthetic sequence derived from human genome
ARKKSGILLLTLVSFLIFILFIIVQLFIMKLRKAHVIWKKE

SEQ ID NO: 33150 - protein, 41 aa, Artificial Sequence
  Quasi-synthetic sequence derived from human genome
IFWKTWIFRKTYIGWKTWIFSGRCGLTGRPGFGGRRRFFWK

SEQ ID NO: 33151 - protein, 41 aa, Artificial Sequence
  Quasi-synthetic sequence derived from human genome
TLLIWVPVKVILHKKRYIYRKIKGWRPVLMMCVVLTTLPCL

SEQ ID NO: 33152 - protein, 41 aa, Artificial Sequence
  Quasi-synthetic sequence derived from human genome
RYLAICRPLRARVLVTRRRVRALIAVLWAVALLSAGPFLFL

SEQ ID NO: 33153 - protein, 41 aa, Artificial Sequence
  Quasi-synthetic sequence derived from human genome
ISKLKEVTLFVKRLRRKTYLSNMAKTMRMVLKSKRRVSVLK

SEQ ID NO: 33154 - protein, 41 aa, Artificial Sequence
  Quasi-synthetic sequence derived from human genome
RKLQKNLKTGSFLNRLGKLLLHLFMVLCLTLFLNNIIKKIL

SEQ ID NO: 33155 - protein, 41 aa, Artificial Sequence
  Quasi-synthetic sequence derived from human genome
WGAWLSARLWKWLKSPRSWRLGLALLLGGALLFWVLLHRRW

SEQ ID NO: 33156 - protein, 41 aa, Artificial Sequence
  Quasi-synthetic sequence derived from human genome
RYPLLLPKGVVLKLKPVATRFPRKAWRQKRSSVLKPLLIQP

SEQ ID NO: 33157 - protein, 41 aa, Artificial Sequence
  Quasi-synthetic sequence derived from human genome
RRRLKYFFMSPCDKFRAKGRKPCKLMLQVVKILVVTVQLIL

SEQ ID NO: 33158 - protein, 41 aa, Artificial Sequence
  Quasi-synthetic sequence derived from human genome
HIKNYIINKDILRRVLVLMASKHAFLALCALRFKRKIIGLK

SEQ ID NO: 33159 - protein, 41 aa, Artificial Sequence
  Quasi-synthetic sequence derived from human genome
LHRSRKLHQQYRLARQRIIQFQARCRAYLVRKAFRHRLWAV

SEQ ID NO: 33160 - protein, 41 aa, Artificial Sequence
  Quasi-synthetic sequence derived from human genome
RGFLARRRYRKMLEEHKAVILQKYARAWLARRRFQSIRRFV

SEQ ID NO: 33161 - protein, 41 aa, Artificial Sequence
  Quasi-synthetic sequence derived from human genome
MAALRPLVKPKIVKKRTKKFIRHQSDRYVKIKRNWRKPRGI

SEQ ID NO: 33162 - protein, 41 aa, Artificial Sequence
  Quasi-synthetic sequence derived from human genome
ALWRRQIYAVATLRFLKLRRERRALLCLLLVLGIAFIPIIL

SEQ ID NO: 33163 - protein, 41 aa, Artificial Sequence
  Quasi-synthetic sequence derived from human genome
RKLTHLRKRIHRPRRRTTRRWKRWFKFRKRKGEKRPRPNHK

SEQ ID NO: 33164 - protein, 41 aa, Artificial Sequence
  Quasi-synthetic sequence derived from human genome
IRRKVSKIQRFHARSLWTNHKRYGYKKHSYRLVKKLKLQKM

SEQ ID NO: 33165 - protein, 41 aa, Artificial Sequence
  Quasi-synthetic sequence derived from human genome
FLRLFRAARLIKLLRQGYTIRILLWTFVQSFKALPYVCLLI

SEQ ID NO: 33166 - protein, 41 aa, Artificial Sequence
  Quasi-synthetic sequence derived from human genome
LLTLFHRLCKLLFFRIRPIFVFDGDAPLLKKQTLVKRRQRK

SEQ ID NO: 33167 - protein, 41 aa, Artificial Sequence
  Quasi-synthetic sequence derived from human genome
RRGRPSRRFLGKKYRKYYYKSPKPLLRPFLCRICGSRFLSH

SEQ ID NO: 33168 - protein, 41 aa, Artificial Sequence
  Quasi-synthetic sequence derived from human genome
RRRMPGLGWMKKCYQMIDRRLRKNLKSFIIVHPSWFIRTIL

SEQ ID NO: 33169 - protein, 41 aa, Artificial Sequence
  Quasi-synthetic sequence derived from human genome
TLKTYLKRFKVMKPKVLRSWCRQILKGLQFLHTRTPPIIHR

SEQ ID NO: 33170 - protein, 41 aa, Artificial Sequence
  Quasi-synthetic sequence derived from human genome
IYAGIVIALLFLCLLPLIVKHIRKKQAKKAAAIRAKKSSKV

SEQ ID NO: 33171 - protein, 41 aa, Artificial Sequence
  Quasi-synthetic sequence derived from human genome
CAVRAMLYSRAVRNLKKKLLPWQRRGLLRAQGLRGWKARRA

SEQ ID NO: 33172 - protein, 41 aa, Artificial Sequence
  Quasi-synthetic sequence derived from human genome
RRRMPGIGWLKKCYQMIDRRLRKNLKSLIIVHPSWFIRTVL

SEQ ID NO: 33173 - protein, 41 aa, Artificial Sequence
  Quasi-synthetic sequence derived from human genome
LKKKLFKRRRVLNRERRLRHRVVGAVIDQGLITRHHLKKRA

SEQ ID NO: 33174 - protein, 41 aa, Artificial Sequence
  Quasi-synthetic sequence derived from human genome
LRALRLLRIFKITKYWASLRNLVVSLMSSMKSIISLLFLLF

SEQ ID NO: 33175 - protein, 41 aa, Artificial Sequence
  Quasi-synthetic sequence derived from human genome
RRQKLLLAQLHHRKRVKAAGQIQAWWRGVLVRRTLLVAALR

SEQ ID NO: 33176 - protein, 41 aa, Artificial Sequence
  Quasi-synthetic sequence derived from human genome
KMRKTIGGVALWRQQICAIARVRLLKLKHERKALLALLLIL

SEQ ID NO: 33177 - protein, 41 aa, Artificial Sequence
  Quasi-synthetic sequence derived from human genome
KLLERAGLVLRLLRALRVLYVMRLARHSLGLRSLGLTMRRC

SEQ ID NO: 33178 - protein, 41 aa, Artificial Sequence
  Quasi-synthetic sequence derived from human genome
VRKILLLQSWFRMVLERRHFLQMKRAAVTIQACWRSYRVRR

SEQ ID NO: 33179 - protein, 41 aa, Artificial Sequence
  Quasi-synthetic sequence derived from human genome
ALAAQLALLGLGLLHALLLVLLLCRLRRLRARARARAAARL

SEQ ID NO: 33180 - protein, 41 aa, Artificial Sequence
  Quasi-synthetic sequence derived from human genome
VANHFSRLKIHFTKVFSAFALVRTIRYLYRRLQRMLGLRRG

SEQ ID NO: 33181 - protein, 41 aa, Artificial Sequence
  Quasi-synthetic sequence derived from human genome
IKSLRVLRVLRPLKTIKRLPKLKAVFDCVVNSLKNVLNILI

SEQ ID NO: 33182 - protein, 41 aa, Artificial Sequence
  Quasi-synthetic sequence derived from human genome
IKSLRVLRVLRPLKTIKRLPKLKAVFDCVVNSLKNVFNILI

SEQ ID NO: 33183 - protein, 41 aa, Artificial Sequence
  Quasi-synthetic sequence derived from human genome
RNKVRHTKKKTFKCIKCSKSFFMLSCLIRHKRIHIRQNIYK

SEQ ID NO: 33184 - protein, 41 aa, Artificial Sequence
  Quasi-synthetic sequence derived from human genome
TWSLRRRPARTLGLLLLVVLGFLVLRRLDWSTLVPLRLRHR

SEQ ID NO: 33185 - protein, 41 aa, Artificial Sequence
  Quasi-synthetic sequence derived from human genome
FLLLVPLLVLALASYRRLCLRLRLADCLVPYSRALYRRRRA

SEQ ID NO: 33186 - protein, 41 aa, Artificial Sequence
  Quasi-synthetic sequence derived from human genome
MSFWCRFRRAFVTVTHRLLLLCLGVVMVCVVLRYMKYRWTK

SEQ ID NO: 33187 - protein, 41 aa, Artificial Sequence
  Quasi-synthetic sequence derived from human genome
RRHFRMKLRNLFTKFIRKFGFELVKRLLPEEYHRVLVNIRK

SEQ ID NO: 33188 - protein, 41 aa, Artificial Sequence
  Quasi-synthetic sequence derived from human genome
AHKRMKVKKLPMILALHLKRFKYMDQLHRYTKLSYRVVFPL

SEQ ID NO: 33189 - protein, 41 aa, Artificial Sequence
  Quasi-synthetic sequence derived from human genome
RREYVKKRQAAIKLEAHWRGALARKAIQRRKWAVRIIRKFI

SEQ ID NO: 33190 - protein, 41 aa, Artificial Sequence
  Quasi-synthetic sequence derived from human genome
KQKLLRHLVPAAALRRKRKALWAHLFSSLRGYLKSLPRVQV

SEQ ID NO: 33191 - protein, 41 aa, Artificial Sequence
  Quasi-synthetic sequence derived from human genome
TVRVILAPWKKGLIAVVIIGVIIALLIIAAKCYFLRKAKAK

SEQ ID NO: 33192 - protein, 41 aa, Artificial Sequence
  Quasi-synthetic sequence derived from human genome
MMRYLRASSNRNFLLTMRPFLKRAILVLSYVLVILYFRLWI

SEQ ID NO: 33193 - protein, 41 aa, Artificial Sequence
  Quasi-synthetic sequence derived from human genome
FLPARQLWKWFGKPTQRRGMKGKARKLFYKAIVRGKEMIRI

SEQ ID NO: 33194 - protein, 41 aa, Artificial Sequence
  Quasi-synthetic sequence derived from human genome
MKFILWRRFRWAIILFIILFILLLFLAIFIYAFPNYAAMKL

SEQ ID NO: 33195 - protein, 41 aa, Artificial Sequence
  Quasi-synthetic sequence derived from human genome
RCRGRKRCIKKFSIQRFPKILVLHLKRFSESRIRTSKLTTF

SEQ ID NO: 33196 - protein, 41 aa, Artificial Sequence
  Quasi-synthetic sequence derived from human genome
LRALRLLRIFKVTKYWSSLRNLVVSLLNSMKSIISLLFLLF

SEQ ID NO: 33197 - protein, 41 aa, Artificial Sequence
  Quasi-synthetic sequence derived from human genome
LLVMAICYTGIIKTLLRCPSKKKYKAIRLIFVIMAVFFIFW

SEQ ID NO: 33198 - protein, 41 aa, Artificial Sequence
  Quasi-synthetic sequence derived from human genome
KYLKVFYKFINLNRYKIRHTRKKPFKCKNCVKSFCMFSHKT

SEQ ID NO: 33199 - protein, 41 aa, Artificial Sequence
  Quasi-synthetic sequence derived from human genome
LLFARGAPAWLRRRYLRLRYEDLVRQPRAQLRRLLRFSGLR

SEQ ID NO: 33200 - protein, 41 aa, Artificial Sequence
  Quasi-synthetic sequence derived from human genome
LHLVLRLRGGAKKRKKKSYTTPKKNKHKRKKVKLAVLKYYK

SEQ ID NO: 33201 - protein, 41 aa, Artificial Sequence
  Quasi-synthetic sequence derived from human genome
ALLQISKLKEVTLFVKRLRRKTYLSNMAKTMRMVLKSKRRV

SEQ ID NO: 33202 - protein, 41 aa, Artificial Sequence
  Quasi-synthetic sequence derived from human genome
RRKMPSLGWLRKCYQQIDRRLRKNLKSLIIVHPSWFIRTLL

SEQ ID NO: 33203 - protein, 41 aa, Artificial Sequence
  Quasi-synthetic sequence derived from human genome
SRRRGFGLFFFLRLHRLLLLFLVLRGTLANKLNVPQVLLPF

SEQ ID NO: 33204 - protein, 41 aa, Artificial Sequence
  Quasi-synthetic sequence derived from human genome
MGSPRAARPPLLLRPVKLLRRRFRLLLALAVVSVGLWTLYL

SEQ ID NO: 33205 - protein, 41 aa, Artificial Sequence
  Quasi-synthetic sequence derived from human genome
VKILRVLRVLRPLRAINRAKGLKHVVQCVFVAIRTIGNIMI

SEQ ID NO: 33206 - protein, 41 aa, Artificial Sequence
  Quasi-synthetic sequence derived from human genome
AQKRMRVKKLPMILALHLKRFKYMEQLHRYTKLSYRVVFPL

SEQ ID NO: 33207 - protein, 41 aa, Artificial Sequence
  Quasi-synthetic sequence derived from human genome
RWLRIKLWISTVALALVPFLLLIPKFARWFSVPWKVIFVFA

SEQ ID NO: 33208 - protein, 41 aa, Artificial Sequence
  Quasi-synthetic sequence derived from human genome
IKIQAWARMWAARRQYLRRLHYFQKNVNSIVKIQAFFRARK

SEQ ID NO: 33209 - protein, 41 aa, Artificial Sequence
  Quasi-synthetic sequence derived from human genome
NLWFAAWLKVFYCLRIANFNHPLFFLMKRKIIVLMPWLLRL

SEQ ID NO: 33210 - protein, 41 aa, Artificial Sequence
  Quasi-synthetic sequence derived from human genome
LKAKKAQLMQYLSLPKTPKMLKMSKGLDARSKRWLKIIWRR

SEQ ID NO: 33211 - protein, 41 aa, Artificial Sequence
  Quasi-synthetic sequence derived from human genome
MKHFLRMLIQVCLYFYCKFLWRCLKFVMRKLTGRCELQRIC

SEQ ID NO: 33212 - protein, 41 aa, Artificial Sequence
  Quasi-synthetic sequence derived from human genome
SKAARDVLGFLRVVRFVRILRIFKLTRHFVGLRVLGHTLRA

SEQ ID NO: 33213 - protein, 41 aa, Artificial Sequence
  Quasi-synthetic sequence derived from human genome
VKILRVLRVLRPLRAINRAKGLKHVVQCVFVAIRTIGNIVI

SEQ ID NO: 33214 - protein, 41 aa, Artificial Sequence
  Quasi-synthetic sequence derived from human genome
VFIIILVLCLRLLQSRCPRVLPKKLQNWNFLPLWMRSLKPW

SEQ ID NO: 33215 - protein, 41 aa, Artificial Sequence
  Quasi-synthetic sequence derived from human genome
RTLDRRLRKNLRALVVVHATWYVKAFLALLRPFISSKFTRK

SEQ ID NO: 33216 - protein, 41 aa, Artificial Sequence
  Quasi-synthetic sequence derived from human genome
KGEAIFNFILVVMFWLIFLLIILSYIKIGKNLLRISKRRSK

SEQ ID NO: 33217 - protein, 41 aa, Artificial Sequence
  Quasi-synthetic sequence derived from human genome
LRILHISVMGGMIALLLSILCLVMILYTRRRWCKRRRVPQP

SEQ ID NO: 33218 - protein, 41 aa, Artificial Sequence
  Quasi-synthetic sequence derived from human genome
GLKPFLLGCPRFVVIDNCIALKKVASRLKKKRKKKNIKTKV

SEQ ID NO: 33219 - protein, 41 aa, Artificial Sequence
  Quasi-synthetic sequence derived from human genome
RKQIKRKAPRGFLKRVFKRKKPQLRLEKSGDLLVHLNCLLF

SEQ ID NO: 33220 - protein, 41 aa, Artificial Sequence
  Quasi-synthetic sequence derived from human genome
MPTPLLPLLLRLLLSCLLLPAARLARQYLLPLLRRLARRLG

SEQ ID NO: 33221 - protein, 41 aa, Artificial Sequence
  Quasi-synthetic sequence derived from human genome
FQARCRAYLVRKAFRHRLWAVLTVQAYARGMIARRLHQRLR

SEQ ID NO: 33222 - protein, 41 aa, Artificial Sequence
  Quasi-synthetic sequence derived from human genome
SRYWRRWNRFCRRKCRAAVKSNVFYWLVIFLVFLNTLTIAS

SEQ ID NO: 33223 - protein, 41 aa, Artificial Sequence
  Quasi-synthetic sequence derived from human genome
WKFFMARVRLQLKIILCFSPVGRTLRVRARKFPAIVNCTAI

SEQ ID NO: 33224 - protein, 41 aa, Artificial Sequence
  Quasi-synthetic sequence derived from human genome
KCLLLTGGCTLLHCFVILPVFLTFFPPSKKHHKKKKRAKRK

SEQ ID NO: 33225 - protein, 41 aa, Artificial Sequence
  Quasi-synthetic sequence derived from human genome
LARRKGRHMGIGKRKGTANARMPEKVTWMRRMRILRRLLRR

SEQ ID NO: 33226 - protein, 41 aa, Artificial Sequence
  Quasi-synthetic sequence derived from human genome
EMRKLFIQRAKKIDKISRIGFPMAFLIFNMFYWIIYKIVRR

SEQ ID NO: 33227 - protein, 41 aa, Artificial Sequence
  Quasi-synthetic sequence derived from human genome
YFKPSVFRCIALRWVRLLGFAIVYGTIILKLYRVLQLFLSR

SEQ ID NO: 33228 - protein, 41 aa, Artificial Sequence
  Quasi-synthetic sequence derived from human genome
FFLFLLSATFNASFLLKLQKWTQKKEKGKKLSRMKLLLKHL

SEQ ID NO: 33229 - protein, 41 aa, Artificial Sequence
  Quasi-synthetic sequence derived from human genome
SKAAKDVLGFLRVVRFVRILRIFKLTRHFVGLRVLGHTLRA

SEQ ID NO: 33230 - protein, 41 aa, Artificial Sequence
  Quasi-synthetic sequence derived from human genome
RRKVSKIQRFHARSLWTNHKRYGYKKHSYRLVKKLKLQKMK

SEQ ID NO: 33231 - protein, 41 aa, Artificial Sequence
  Quasi-synthetic sequence derived from human genome
KYPQPKGQKKKKIVKYGMGGLIILFLIAIIWFPLLFMSLVR

SEQ ID NO: 33232 - protein, 41 aa, Artificial Sequence
  Quasi-synthetic sequence derived from human genome
IQKRVRGWLARTHYKRSMHAIIYLQCCFRRMMAKRELKKLK

SEQ ID NO: 33233 - protein, 41 aa, Artificial Sequence
  Quasi-synthetic sequence derived from human genome
RSRIPLVRNRRFQLCRCMNPRARKNRSQIALFQKLRFQFFC

SEQ ID NO: 33234 - protein, 41 aa, Artificial Sequence
  Quasi-synthetic sequence derived from human genome
LIKPFGARKKRSWYLTWKYKLTNQRALRRFCQTGAVLFLLV

SEQ ID NO: 33235 - protein, 41 aa, Artificial Sequence
  Quasi-synthetic sequence derived from human genome
KLLKLRRNIVKLSLYRHFTNTLILAVAASIVFIIWTTMKFR

SEQ ID NO: 33236 - protein, 41 aa, Artificial Sequence
  Quasi-synthetic sequence derived from human genome
WALFFRRPKASLPRVFVLRALLMVLVFLLVVSYWLFYGVRI

SEQ ID NO: 33237 - protein, 41 aa, Artificial Sequence
  Quasi-synthetic sequence derived from human genome
VFLLAILGGMAFILLVLLCLLLYYCRRKCLKPRQHHRKLQL

SEQ ID NO: 33238 - protein, 41 aa, Artificial Sequence
  Quasi-synthetic sequence derived from human genome
KATGRKAPLWLRAKFQRLLFKLGCYIQKNCGKFLVVGLLIF

SEQ ID NO: 33239 - protein, 41 aa, Artificial Sequence
  Quasi-synthetic sequence derived from human genome
RKLKFFFMNPCEKFWARGRKPWKLAIQILKIAMVTIQLVLF

SEQ ID NO: 33240 - protein, 41 aa, Artificial Sequence
  Quasi-synthetic sequence derived from human genome
MGRQWLAIQKLRSKIHKKVDRKASKGRKLRFHVLSKLLSFM

SEQ ID NO: 33241 - protein, 41 aa, Artificial Sequence
  Quasi-synthetic sequence derived from human genome
LRKLKFSPIKYGYQPRRNFWPARLATRLLKLRYLILGSAVG

SEQ ID NO: 33242 - protein, 41 aa, Artificial Sequence
  Quasi-synthetic sequence derived from human genome
LLRIANFSNLIFLRIKRRVKSVVLVILLGPLLFLVCHLFVI

SEQ ID NO: 33243 - protein, 41 aa, Artificial Sequence
  Quasi-synthetic sequence derived from human genome
KLKFWTHCVLATLIMFTIFSFFAEQLIALKRKIFPRRRIHK

SEQ ID NO: 33244 - protein, 41 aa, Artificial Sequence
  Quasi-synthetic sequence derived from human genome
AKQTDRVVKIAGISAGILVFILLLLVVILIVKKSKLAKKRK

SEQ ID NO: 33245 - protein, 41 aa, Artificial Sequence
  Quasi-synthetic sequence derived from human genome
RPKTSFNWFVNPLKTFVFFIWRRYWRTLVLLLLVLLTVFLL

SEQ ID NO: 33246 - protein, 41 aa, Artificial Sequence
  Quasi-synthetic sequence derived from human genome
FMVIRFPGRRGYGRLRPRARSLSKASTAINWLTKKFLLKKA

SEQ ID NO: 33247 - protein, 41 aa, Artificial Sequence
  Quasi-synthetic sequence derived from human genome
KYQKILWKVPSFLITQVRRMNEATMLLKKQLPSVRKLLRRK

SEQ ID NO: 33248 - protein, 41 aa, Artificial Sequence
  Quasi-synthetic sequence derived from human genome
PGAWRRDIFGRIIWHKFKQWVIPWHLNKRYNRKRFFALPYV

SEQ ID NO: 33249 - protein, 41 aa, Artificial Sequence
  Quasi-synthetic sequence derived from human genome
IVAAMRRIRYEFKAKNIKKKKVSIMVSVDGVKVILKKKKKK

SEQ ID NO: 33250 - protein, 41 aa, Artificial Sequence
  Quasi-synthetic sequence derived from human genome
KLKLFRHYYVLIVCYIYFTRIIAFLLKLAVPFQWKWLYQLL

SEQ ID NO: 33251 - protein, 41 aa, Artificial Sequence
  Quasi-synthetic sequence derived from human genome
KFFRWVRRAWQRIISWVFFWRQKIKPTISGHPDSKKHSLKK

SEQ ID NO: 33252 - protein, 41 aa, Artificial Sequence
  Quasi-synthetic sequence derived from human genome
FLKKLLGKKLTRCLKPFENSRLRLWTKWVFAGVSLVGLILW

SEQ ID NO: 33253 - protein, 41 aa, Artificial Sequence
  Quasi-synthetic sequence derived from human genome
KQRLRKRVNAALVIQKYWRRVLAQRKLLMLKKEKLEKVQNK

SEQ ID NO: 33254 - protein, 41 aa, Artificial Sequence
  Quasi-synthetic sequence derived from human genome
RLGLPARPWPRWLGVAALGLAAVALGTVAWRRAWPRRRRRL

SEQ ID NO: 33255 - protein, 41 aa, Artificial Sequence
  Quasi-synthetic sequence derived from human genome
RLRALVVIPIIFGILFAILLVLVFIKKVAKKPTNKAPHPKQ

SEQ ID NO: 33256 - protein, 41 aa, Artificial Sequence
  Quasi-synthetic sequence derived from human genome
ISLLLLLVVCGIGCVWHWKHRVATRFTLPRFLQRRSSRRKV

SEQ ID NO: 33257 - protein, 41 aa, Artificial Sequence
  Quasi-synthetic sequence derived from human genome
LRSKKAVWHKLLSKQRKRAVVACFRMAPLYNLPRHRSINLF

SEQ ID NO: 33258 - protein, 41 aa, Artificial Sequence
  Quasi-synthetic sequence derived from human genome
ACIPVFRLARRRKKILFYCHFPDLLLTKRDSFLKRLYRAPI

SEQ ID NO: 33259 - protein, 41 aa, Artificial Sequence
  Quasi-synthetic sequence derived from human genome
RLRAVRLRSGAKALGKARRKVTVLVLVVLAVCLLCWTPFHL

SEQ ID NO: 33260 - protein, 41 aa, Artificial Sequence
  Quasi-synthetic sequence derived from human genome
ILNFQRALALFVITCLVIFVLVHSFLKKLLGKKLTRCLKPF

SEQ ID NO: 33261 - protein, 41 aa, Artificial Sequence
  Quasi-synthetic sequence derived from human genome
YRRRCCRLCIWLLQTLVHLLQLGQVWRYLRALYLGLQSRWR

SEQ ID NO: 33262 - protein, 41 aa, Artificial Sequence
  Quasi-synthetic sequence derived from human genome
LRLFRAARLIKLLRQGYTIRILLWTFVQSFKALPYVCLLIA

SEQ ID NO: 33263 - protein, 41 aa, Artificial Sequence
  Quasi-synthetic sequence derived from human genome
LFRIKCVTRIQAYWRGCVVRKWYRNLRKTVPPTDAKLRKKF

SEQ ID NO: 33264 - protein, 41 aa, Artificial Sequence
  Quasi-synthetic sequence derived from human genome
LFFLLSLGIILFCYVEILRTLFRSRSKRRHRTVKLIFAIVV

SEQ ID NO: 33265 - protein, 41 aa, Artificial Sequence
  Quasi-synthetic sequence derived from human genome
FSRSKKKKKKKKKRQCFAFLIYFRLGIKMGKQGIINKEGYL

SEQ ID NO: 33266 - protein, 41 aa, Artificial Sequence
  Quasi-synthetic sequence derived from human genome
NPWNTIALLCGAFLALFKAAEFAKLSIKWMIKIRKRYLKRR

SEQ ID NO: 33267 - protein, 41 aa, Artificial Sequence
  Quasi-synthetic sequence derived from human genome
ILKTLLRCRNEKKRHRAVRLIFTIMIVYFLFWAPYNIVLLL

SEQ ID NO: 33268 - protein, 41 aa, Artificial Sequence
  Quasi-synthetic sequence derived from human genome
TFRIKRFLAKKQKQNRPIPQWIRMKTGNKIRYNSKRRHWRR

SEQ ID NO: 33269 - protein, 41 aa, Artificial Sequence
  Quasi-synthetic sequence derived from human genome
HRRKIFPGLILSDIKPAKRMKFKTVCYLLVQLMHCRKMFKA

SEQ ID NO: 33270 - protein, 41 aa, Artificial Sequence
  Quasi-synthetic sequence derived from human genome
WRFIRVFIKTIRRDIFGGLVLLKVKAKVRQCLQERRTVPIL

SEQ ID NO: 33271 - protein, 41 aa, Artificial Sequence
  Quasi-synthetic sequence derived from human genome
PSKIKTFLSLVWKRRILFFVVTLVSVFLVWKFTYAHKYLLA

SEQ ID NO: 33272 - protein, 41 aa, Artificial Sequence
  Quasi-synthetic sequence derived from human genome
LLRLLGLRRGLRRLRRLWAGPRVQRGRGRGRGRGWGPSRGC

SEQ ID NO: 33273 - protein, 41 aa, Artificial Sequence
  Quasi-synthetic sequence derived from human genome
ILAKISRPKKRAKTITFSKNAVISKRGGKLCLLIRVANLRK

SEQ ID NO: 33274 - protein, 41 aa, Artificial Sequence
  Quasi-synthetic sequence derived from human genome
LRIIRLVRVFRIFKLSRHSKGLQILGHTLRASMRELGLLIF

SEQ ID NO: 33275 - protein, 41 aa, Artificial Sequence
  Quasi-synthetic sequence derived from human genome
KLGVCANGLLIYKDRLRINRFAWPKILKISYKRSNFYIKVR

SEQ ID NO: 33276 - protein, 41 aa, Artificial Sequence
  Quasi-synthetic sequence derived from human genome
RKYIYIRSCVVIIQKRFRCFQAQKLYKRRKESILTIQKYYK

SEQ ID NO: 33277 - protein, 41 aa, Artificial Sequence
  Quasi-synthetic sequence derived from human genome
LSVFRQPLSSLWRSLVPLFCWLRATFWLLATKRRKQQLVLR

SEQ ID NO: 33278 - protein, 41 aa, Artificial Sequence
  Quasi-synthetic sequence derived from human genome
KMKKKTFKGLIRIFRKGVIAVLAANRLKILGQSCASLFTWM

SEQ ID NO: 33279 - protein, 41 aa, Artificial Sequence
  Quasi-synthetic sequence derived from human genome
KIIRPLRNIFLKKPVFAKTVSIFIWFFLFFISLPNTILSNK

SEQ ID NO: 33280 - protein, 41 aa, Artificial Sequence
  Quasi-synthetic sequence derived from human genome
LLFSKLVLKLPWTQVGFSLLFLYLGSGGWRFIRVFIKTIRR

SEQ ID NO: 33281 - protein, 41 aa, Artificial Sequence
  Quasi-synthetic sequence derived from human genome
LQSYLRGFLARNRYRKILREHKAVIIQKRVRGWLARTHYKR

SEQ ID NO: 33282 - protein, 41 aa, Artificial Sequence
  Quasi-synthetic sequence derived from human genome
LTSIISAVVGILLVVVLGVVFGILIKRRQQKIRKYTMRRLL

SEQ ID NO: 33283 - protein, 41 aa, Artificial Sequence
  Quasi-synthetic sequence derived from human genome
RLKHRGSSLHPFRKGLQEKDKVWLLREQKRKKKLRKLLKRL

SEQ ID NO: 33284 - protein, 41 aa, Artificial Sequence
  Quasi-synthetic sequence derived from human genome
RRAVKILKKKKLRRIPNGEANVKKEIQLLRRLRHKNVIQLV

SEQ ID NO: 33285 - protein, 41 aa, Artificial Sequence
  Quasi-synthetic sequence derived from human genome
RWLLRTKRLHWSRLLFLLGMLIIGSTYQHLRRPRGLSSLWA

SEQ ID NO: 33286 - protein, 41 aa, Artificial Sequence
  Quasi-synthetic sequence derived from human genome
LPKYKKNLKALYVVHPTSFIKVLWNILKPLISHKFGKKVIY

SEQ ID NO: 33287 - protein, 41 aa, Artificial Sequence
  Quasi-synthetic sequence derived from human genome
MFLTALLWRGRIPGRQWIGKHRRPRFVSLRAKQNMIRRLEI

SEQ ID NO: 33288 - protein, 41 aa, Artificial Sequence
  Quasi-synthetic sequence derived from human genome
RFLKLKYYSIILQSRIRMIIAVTSYKRYLWATVTIQRHWRA

SEQ ID NO: 33289 - protein, 41 aa, Artificial Sequence
  Quasi-synthetic sequence derived from human genome
KIQAWWRGTLVRRTLLHAALRAWIIQCWWRMTLSRVLEKKR

SEQ ID NO: 33290 - protein, 41 aa, Artificial Sequence
  Quasi-synthetic sequence derived from human genome
LGRKWHKASNYIFVAIFWIVFLLLIVFYTAITKKIFKSHLK

SEQ ID NO: 33291 - protein, 41 aa, Artificial Sequence
  Quasi-synthetic sequence derived from human genome
RRRRARSSVCRRKVAQAREKRFTFVLAVVMGVFVLCWFPFF

SEQ ID NO: 33292 - protein, 41 aa, Artificial Sequence
  Quasi-synthetic sequence derived from human genome
KPIPVMLLGVTLLKKKYPLAKYLCVLLIVAGVALFMYKPKK

SEQ ID NO: 33293 - protein, 41 aa, Artificial Sequence
  Quasi-synthetic sequence derived from human genome
IQKVLRGYRYRKEFLRQRRAAVTLQAWWRGYCNRRNFKLIL

SEQ ID NO: 33294 - protein, 41 aa, Artificial Sequence
  Quasi-synthetic sequence derived from human genome
LKIVILGLVLPLLVMVICYSGILKTLLRCRNEKKRHRAVRL

SEQ ID NO: 33295 - protein, 41 aa, Artificial Sequence
  Quasi-synthetic sequence derived from human genome
FKKIVERRDALLVIQWNIRAFMGVKNWPWMKLYFKIKPLLK

SEQ ID NO: 33296 - protein, 41 aa, Artificial Sequence
  Quasi-synthetic sequence derived from human genome
KGFVMLAVSFLVAAICYFRRLHLYSGHKLKWWIGYLQRKFK

SEQ ID NO: 33297 - protein, 41 aa, Artificial Sequence
  Quasi-synthetic sequence derived from human genome
FYLLKIANFSNLIFLRLKRRVKSVILVVLLGPLLFLACHLF

SEQ ID NO: 33298 - protein, 41 aa, Artificial Sequence
  Quasi-synthetic sequence derived from human genome
LLKLVHGSPLVFGEKFKLFTLVSACIPVFRLARRRKKILFY

SEQ ID NO: 33299 - protein, 41 aa, Artificial Sequence
  Quasi-synthetic sequence derived from human genome
RRPPQRPIGKAKPKKQSKKKVPFWNVQNKIILFTVFLFILA

SEQ ID NO: 33300 - protein, 41 aa, Artificial Sequence
  Quasi-synthetic sequence derived from human genome
FLWFTNPCKTMKFIVWRRFKWVIIGLLFLLILLLFVAVLLY

SEQ ID NO: 33301 - protein, 41 aa, Artificial Sequence
  Quasi-synthetic sequence derived from human genome
RLRPRLHFCLVLLLLLVVPAAWGCGPGRVVGSRRRPPRKLV

SEQ ID NO: 33302 - protein, 41 aa, Artificial Sequence
  Quasi-synthetic sequence derived from human genome
LRTGGWKVSAVTLAYLIFCLCSLVGILHLQRALVLRRKRKR

SEQ ID NO: 33303 - protein, 41 aa, Artificial Sequence
  Quasi-synthetic sequence derived from human genome
RRRRRLRRRPRGLRCSRLPPPPPLPLLLGLLLAAAGPGAAR

SEQ ID NO: 33304 - protein, 41 aa, Artificial Sequence
  Quasi-synthetic sequence derived from human genome
RVLVRAHRHRGLRPRRQKALRMILAVVLVFFVCWLPENVFI

SEQ ID NO: 33305 - protein, 41 aa, Artificial Sequence
  Quasi-synthetic sequence derived from human genome
PFRLIRKMFSFKVSRWMGLACFRSLAASSPSIRQKKLMHKL

SEQ ID NO: 33306 - protein, 41 aa, Artificial Sequence
  Quasi-synthetic sequence derived from human genome
TLKTYLRRFREMKPRVLQRWSRQILRGLHFLHSRVPPILHR

SEQ ID NO: 33307 - protein, 41 aa, Artificial Sequence
  Quasi-synthetic sequence derived from human genome
FLVVVALLCVPWMLLFKPLVLRRQYLRRKHLGTLNFGGIRV

SEQ ID NO: 33308 - protein, 41 aa, Artificial Sequence
  Quasi-synthetic sequence derived from human genome
SFTLPYPVKIKVRFSFFLQIYLIMIFLGLYINFRHLYKQRR

SEQ ID NO: 33309 - protein, 41 aa, Artificial Sequence
  Quasi-synthetic sequence derived from human genome
LKLHRVLKVFLSRTAQRIPYMTGGRVMRMLAVILLVVFWFL

SEQ ID NO: 33310 - protein, 41 aa, Artificial Sequence
  Quasi-synthetic sequence derived from human genome
TFKTCKEYLRPLKKFLRKLHLPRDLPQKKKLKYMKQSLVVL

SEQ ID NO: 33311 - protein, 41 aa, Artificial Sequence
  Quasi-synthetic sequence derived from human genome
RFVQLSGRPHLPGKKKIRWDPVRRRFIQSCPIIRIPNRFLR

SEQ ID NO: 33312 - protein, 41 aa, Artificial Sequence
  Quasi-synthetic sequence derived from human genome
LKIKNTFCLWKRLIKLKDNHCEQLRVKIRKLKNKASVLQKR

SEQ ID NO: 33313 - protein, 41 aa, Artificial Sequence
  Quasi-synthetic sequence derived from human genome
FRRLKAHNLCRQIRAACVIQSYWRMRQDRVRFLNLKKTIIK

SEQ ID NO: 33314 - protein, 41 aa, Artificial Sequence
  Quasi-synthetic sequence derived from human genome
RRPSPYWRLTWRVVSPLLLTIFVAYIILLFWKPLRYKAWNP

SEQ ID NO: 33315 - protein, 41 aa, Artificial Sequence
  Quasi-synthetic sequence derived from human genome
VILLIISSILGSVWLAYKTPKLLRTARGRRIKKCATQLCRR

SEQ ID NO: 33316 - protein, 41 aa, Artificial Sequence
  Quasi-synthetic sequence derived from human genome
LRIIRLVRVFRIFKLSRHSKGLQILGQTLKASMRELGLLIF

SEQ ID NO: 33317 - protein, 41 aa, Artificial Sequence
  Quasi-synthetic sequence derived from human genome
RFSCTQIWVKMYGYFAGLCRRLQKFWRVTVKGFFVKKKEKK

SEQ ID NO: 33318 - protein, 41 aa, Artificial Sequence
  Quasi-synthetic sequence derived from human genome
MLGVCANGLLIYRDRLRINRFAWPKILKISYKRSNFYIKIR

SEQ ID NO: 33319 - protein, 41 aa, Artificial Sequence
  Quasi-synthetic sequence derived from human genome
TRNPVFPRFIKIIEVKNKKLVELLRRKVRLAQPYVGVFLKR

SEQ ID NO: 33320 - protein, 41 aa, Artificial Sequence
  Quasi-synthetic sequence derived from human genome
RGWVALVLHLRAHSAAKRPIACPKCERRFWRRKQLRAHLRR

SEQ ID NO: 33321 - protein, 41 aa, Artificial Sequence
  Quasi-synthetic sequence derived from human genome
RYLRVKLTVRYKRVTTHRRIWLALGLCWLVSFLVGLTPMFG

SEQ ID NO: 33322 - protein, 41 aa, Artificial Sequence
  Quasi-synthetic sequence derived from human genome
MKKFLYIKSVFHTLRMAQRRHKRVRTWTRHINIFNKDYIFV

SEQ ID NO: 33323 - protein, 41 aa, Artificial Sequence
  Quasi-synthetic sequence derived from human genome
RVRFLNLKKTIIKFQAHVRKHQQRQKYKKMKKAAVIIQTHF

SEQ ID NO: 33324 - protein, 41 aa, Artificial Sequence
  Quasi-synthetic sequence derived from human genome
YLVRKAFRHRLWAVLTVQAYARGMIARRLHQRLRAEYLWRL

SEQ ID NO: 33325 - protein, 41 aa, Artificial Sequence
  Quasi-synthetic sequence derived from human genome
FLRKCFAISLLVICIIISIGIFYGFVANHQVRTRIKRSRKL

SEQ ID NO: 33326 - protein, 41 aa, Artificial Sequence
  Quasi-synthetic sequence derived from human genome
LKIKLAVRMDKPQNMKHSGYLWAIGKNVWKRWKKRFFVLVQ

SEQ ID NO: 33327 - protein, 41 aa, Artificial Sequence
  Quasi-synthetic sequence derived from human genome
WRAAVPIGLLVCLCLLQAFGYRLRRVIAAFYFPKREKKRIL

SEQ ID NO: 33328 - protein, 41 aa, Artificial Sequence
  Quasi-synthetic sequence derived from human genome
KKLVPVRRRAWGQLCLPPQRLRVTRHPLIPAPVLGLLLLLL

SEQ ID NO: 33329 - protein, 41 aa, Artificial Sequence
  Quasi-synthetic sequence derived from human genome
KLLKRLRLLPALLILRAFKPHRKIRDYRVVVVGTAGVGKST

SEQ ID NO: 33330 - protein, 41 aa, Artificial Sequence
  Quasi-synthetic sequence derived from human genome
KVVQFFRILRIFKLIAPKLLQIIDKRMSHQKTFWYGILKGY

SEQ ID NO: 33331 - protein, 41 aa, Artificial Sequence
  Quasi-synthetic sequence derived from human genome
KLYACKKLNKKRLKKRKGYQGAMVEKKILMKVHSRFIVSLA

SEQ ID NO: 33332 - protein, 41 aa, Artificial Sequence
  Quasi-synthetic sequence derived from human genome
KILGVLRVLRLLRTLRPLRVISRAPGLKLVVETLISSLRPI

SEQ ID NO: 33333 - protein, 41 aa, Artificial Sequence
  Quasi-synthetic sequence derived from human genome
LFAFFIFIMSLLLISGQRPVNLTMRRKLRKHNCLQRRCMPL

SEQ ID NO: 33334 - protein, 41 aa, Artificial Sequence
  Quasi-synthetic sequence derived from human genome
MKFIVWRRFKWVIIGLLFLLILLLFVAVLLYSLPNYLSMKI

SEQ ID NO: 33335 - protein, 41 aa, Artificial Sequence
  Quasi-synthetic sequence derived from human genome
YKKLLERRDSLLVIQWNIRAFMGVKNWPWMKLYFKIKPLLK

SEQ ID NO: 33336 - protein, 41 aa, Artificial Sequence
  Quasi-synthetic sequence derived from human genome
RLAFQGWLRRGVLLVRAPPACLQVLRDAWRRRALRPPRGFR

SEQ ID NO: 33337 - protein, 41 aa, Artificial Sequence
  Quasi-synthetic sequence derived from human genome
RLLRLIILIRIFHLLHQKRQLEKLMRRLVSENKRRYTRDGF

SEQ ID NO: 33338 - protein, 41 aa, Artificial Sequence
  Quasi-synthetic sequence derived from human genome
YTFPPLYYRRAHRRFVTKKALCIRVFQETQKLKKRRRALKA

SEQ ID NO: 33339 - protein, 41 aa, Artificial Sequence
  Quasi-synthetic sequence derived from human genome
GKHNKKLKKSIKIIFIVVAAFLVSWLPFNTFKFLAIVSGLR

SEQ ID NO: 33340 - protein, 41 aa, Artificial Sequence
  Quasi-synthetic sequence derived from human genome
RRMIDYRHFVPQMPFVPAVAKSIPRKRISLKRPKKCFRNLF

SEQ ID NO: 33341 - protein, 41 aa, Artificial Sequence
  Quasi-synthetic sequence derived from human genome
KLYWWRFLSMWGMFSVITSYILFRATRKPLSGRTPRLVYKW

SEQ ID NO: 33342 - protein, 41 aa, Artificial Sequence
  Quasi-synthetic sequence derived from human genome
KRRERAVAIVRLVLGFLWPLLTLTICYTFILLRTWSRRATR

SEQ ID NO: 33343 - protein, 41 aa, Artificial Sequence
  Quasi-synthetic sequence derived from human genome
ILRGKMMQRRPRSAEVKYFYFFKILLRLRLAILKYLFIDDK

SEQ ID NO: 33344 - protein, 41 aa, Artificial Sequence
  Quasi-synthetic sequence derived from human genome
FRALGVATQTAIAAAIALLALTALLLVAMICRRRRRRKKAR

SEQ ID NO: 33345 - protein, 41 aa, Artificial Sequence
  Quasi-synthetic sequence derived from human genome
SKRRKSNPKPLVLSEARKQLMIYRLPQVLRLHLKRFRWSGR

SEQ ID NO: 33346 - protein, 41 aa, Artificial Sequence
  Quasi-synthetic sequence derived from human genome
CVLWQQLQFIPFFKYCLLRKSFTCWKKNVRLQGLHRLQKFL

SEQ ID NO: 33347 - protein, 41 aa, Artificial Sequence
  Quasi-synthetic sequence derived from human genome
FLRVVRFVRILRIFKLTRHFVGLRVLGHTLRASTNEFLLLI

SEQ ID NO: 33348 - protein, 41 aa, Artificial Sequence
  Quasi-synthetic sequence derived from human genome
LWALSLLLGVARSLWMLLKLRQRLRSPTAPFTSPLPRGKRR

SEQ ID NO: 33349 - protein, 41 aa, Artificial Sequence
  Quasi-synthetic sequence derived from human genome
KILGVLRVLRLLRTLRPLRVISRAPGLKLVVETLISSLKPI

SEQ ID NO: 33350 - protein, 41 aa, Artificial Sequence
  Quasi-synthetic sequence derived from human genome
LLLGKGCRYFRYILKQDHQILGKKIKRMKRSVKKYSIVNPR

SEQ ID NO: 33351 - protein, 41 aa, Artificial Sequence
  Quasi-synthetic sequence derived from human genome
KVIKYIWRIGTDGRTVRRTMNIVPRTKVKTIKMFLILNLLF

SEQ ID NO: 33352 - protein, 41 aa, Artificial Sequence
  Quasi-synthetic sequence derived from human genome
NVIIFFAFVLLLSGALAYCLALQLYVRRRKKLPSVLLFKKP

SEQ ID NO: 33353 - protein, 41 aa, Artificial Sequence
  Quasi-synthetic sequence derived from human genome
KLLKDGGVLSPILTRLMNFFVFSRGLLQYINQRKKFRRRWV

SEQ ID NO: 33354 - protein, 41 aa, Artificial Sequence
  Quasi-synthetic sequence derived from human genome
YWKAQRYRLIREFHSRPALAPPFIVISHLRLLLRQLCRRPR

SEQ ID NO: 33355 - protein, 41 aa, Artificial Sequence
  Quasi-synthetic sequence derived from human genome
LRGARVITPEDLLFLMRKDKKKLRRLLKYMFIRDYKSKIVK

SEQ ID NO: 33356 - protein, 41 aa, Artificial Sequence
  Quasi-synthetic sequence derived from human genome
FRIQEVLKHARHFRGRKNRCYRLAVRTVIRAFVKCTKARYL

SEQ ID NO: 33357 - protein, 41 aa, Artificial Sequence
  Quasi-synthetic sequence derived from human genome
KYLKVFYKFLNSNRPKIRHTEKKSFKCKKRVKLFCMLSHKT

SEQ ID NO: 33358 - protein, 41 aa, Artificial Sequence
  Quasi-synthetic sequence derived from human genome
SFRNLRLPKRLRVVYFLARTRLAQRLIMAGTVVWIGILVYT

SEQ ID NO: 33359 - protein, 41 aa, Artificial Sequence
  Quasi-synthetic sequence derived from human genome
IPLFRRFGRQRKIGGRGRIISPYRTPVLRRHRYSIFRSTTR

SEQ ID NO: 33360 - protein, 41 aa, Artificial Sequence
  Quasi-synthetic sequence derived from human genome
AKKSAKLYIPYIILTIIILTIVGFIWLLKVNGCRKYKLNKT

SEQ ID NO: 33361 - protein, 41 aa, Artificial Sequence
  Quasi-synthetic sequence derived from human genome
FFILRRKPVEQKKIFTIQGCYPVIRCLLRRRGWVEKKMVHR

SEQ ID NO: 33362 - protein, 41 aa, Artificial Sequence
  Quasi-synthetic sequence derived from human genome
LTPIKHLRKSLKIIYLNSIQQLEIRNMSWPRLIRKLRCYLK

SEQ ID NO: 33363 - protein, 41 aa, Artificial Sequence
  Quasi-synthetic sequence derived from human genome
KLMTQMRMGKKKRAMKGKKPSFMVIRFPGRRGYGRLRPRAR

SEQ ID NO: 33364 - protein, 41 aa, Artificial Sequence
  Quasi-synthetic sequence derived from human genome
LLSLKKNKIHSLPDKVFIKYTKLKKIFLQHNCIRHISRKAF

SEQ ID NO: 33365 - protein, 41 aa, Artificial Sequence
  Quasi-synthetic sequence derived from human genome
IFLLFMQSIATISLFLNILEIFHLGFKKIKRGLWGKYKLKK

SEQ ID NO: 33366 - protein, 41 aa, Artificial Sequence
  Quasi-synthetic sequence derived from human genome
KVAARMVWRLLHGQVLTRRERRRLLRTCVDFFRLVPFMVFL

SEQ ID NO: 33367 - protein, 41 aa, Artificial Sequence
  Quasi-synthetic sequence derived from human genome
RNVKFPLPIYKSKKGWTAYKLQLFKMFPIILAILVSWLLCF

SEQ ID NO: 33368 - protein, 41 aa, Artificial Sequence
  Quasi-synthetic sequence derived from human genome
KLFGHLTSARRARKSEVPHFRLKKVQNIKMWLSLRSYLKRR

SEQ ID NO: 33369 - protein, 41 aa, Artificial Sequence
  Quasi-synthetic sequence derived from human genome
YRFLARRTNSTFNQVVLKRLFMSRTNRPPLSLSRMIRKMKL

SEQ ID NO: 33370 - protein, 41 aa, Artificial Sequence
  Quasi-synthetic sequence derived from human genome
LYRFLARRTNSTFNQVVLKRLFMSRTNRPPLSLSRMIRKMK

SEQ ID NO: 33371 - protein, 41 aa, Artificial Sequence
  Quasi-synthetic sequence derived from human genome
RAKIQDYHILTRKRIRYRFRRFIQQFSQCKATARNLKLKYL

SEQ ID NO: 33372 - protein, 41 aa, Artificial Sequence
  Quasi-synthetic sequence derived from human genome
LRVIRLVRVFRIFKLSRHSKGLQILGQTLKASMRELGLLIF

SEQ ID NO: 33373 - protein, 41 aa, Artificial Sequence
  Quasi-synthetic sequence derived from human genome
LRVIRLVRVFRIFKLSRHSKGLQILGKTLQASMRELGLLIF

SEQ ID NO: 33374 - protein, 41 aa, Artificial Sequence
  Quasi-synthetic sequence derived from human genome
LCLFCLKLFKTAIPYMNHCWRHSRRRVLQCSKCRLQFLTLK

SEQ ID NO: 33375 - protein, 41 aa, Artificial Sequence
  Quasi-synthetic sequence derived from human genome
RLRHPRTRWKNWWVRGILTLAMIAFFFIIIYLGPMVLMIIV

SEQ ID NO: 33376 - protein, 41 aa, Artificial Sequence
  Quasi-synthetic sequence derived from human genome
RPFQCCFCQKGFKIQSKLLKHKQIHTRNKAFRALLLKKRRT

SEQ ID NO: 33377 - protein, 41 aa, Artificial Sequence
  Quasi-synthetic sequence derived from human genome
TIPVFAFLGAMVVLAFFVVQINKAKSRPKRRKPRVKRPQLM

SEQ ID NO: 33378 - protein, 41 aa, Artificial Sequence
  Quasi-synthetic sequence derived from human genome
FFNSKVALFAAVGAGCVIFLLIIIFLTVLLLKLRKRHRKHT

SEQ ID NO: 33379 - protein, 41 aa, Artificial Sequence
  Quasi-synthetic sequence derived from human genome
ILGVCSSGLLVYKDKLRINRFPWPKVLKISYKRSSFFIKIR

SEQ ID NO: 33380 - protein, 41 aa, Artificial Sequence
  Quasi-synthetic sequence derived from human genome
VLKNLSLLKLLKSSNRRIQELHKLAKRCWHSLLSVPKILRI

SEQ ID NO: 33381 - protein, 41 aa, Artificial Sequence
  Quasi-synthetic sequence derived from human genome
MLGVCASGLLIYRDRLRINRFAWPKVLKISYKRNNFYIKIR

SEQ ID NO: 33382 - protein, 41 aa, Artificial Sequence
  Quasi-synthetic sequence derived from human genome
LWKRLLIARRSRKGFFAQIVLPAVFVCIALVFSLIVPPFGK

SEQ ID NO: 33383 - protein, 41 aa, Artificial Sequence
  Quasi-synthetic sequence derived from human genome
RIHFRFPNRPFVPSRCNHRFPFQPFYWPHRYLTYRYFPRRR

SEQ ID NO: 33384 - protein, 41 aa, Artificial Sequence
  Quasi-synthetic sequence derived from human genome
KFKQWVIPWHLNKRYNRKRFFALPYVDHFLRLEREKRARIK

SEQ ID NO: 33385 - protein, 41 aa, Artificial Sequence
  Quasi-synthetic sequence derived from human genome
IFYTLVIPLLNPFIYSLRNKEVINIMKKIMKKRKFCHILKQ

SEQ ID NO: 33386 - protein, 41 aa, Artificial Sequence
  Quasi-synthetic sequence derived from human genome
AKPFFRLQKFLRRTQFLLFFLTAAYLMTGSLLLLQRVRVAL

SEQ ID NO: 33387 - protein, 41 aa, Artificial Sequence
  Quasi-synthetic sequence derived from human genome
LTGLYGFIFYLLASVLLSLLLILKAGRRWNKYFKSRRPLFT

SEQ ID NO: 33388 - protein, 41 aa, Artificial Sequence
  Quasi-synthetic sequence derived from human genome
LLKTVSYKACLPPSLRDLIQGLSFVTRRRIRRTVRRALRRV

SEQ ID NO: 33389 - protein, 41 aa, Artificial Sequence
  Quasi-synthetic sequence derived from human genome
RFKKGKIVLLFSLLCWVLFNLGIGFVKPATLRCVPKIRPTT

SEQ ID NO: 33390 - protein, 41 aa, Artificial Sequence
  Quasi-synthetic sequence derived from human genome
KKLISLAYTLLTPLLNPLIYSLRNSEMKRTLIKLWRRKVIL

SEQ ID NO: 33391 - protein, 41 aa, Artificial Sequence
  Quasi-synthetic sequence derived from human genome
LLVLYKKGVYLSHTGGKMLFWVLGLLILCGFLWTRKGKLKI

SEQ ID NO: 33392 - protein, 41 aa, Artificial Sequence
  Quasi-synthetic sequence derived from human genome
KLFSHITSARKARKYEIPHFRLKKVENIKIWLSLRSYLKRR

SEQ ID NO: 33393 - protein, 41 aa, Artificial Sequence
  Quasi-synthetic sequence derived from human genome
IIPLIVVSALTFVCLILLIAVLVYWRGCNKIKSKGFPRRFR

SEQ ID NO: 33394 - protein, 41 aa, Artificial Sequence
  Quasi-synthetic sequence derived from human genome
LHVVLSSKVCRGYLVKMGGKIKSWKKRWFVFDRLKRTLSYY

SEQ ID NO: 33395 - protein, 41 aa, Artificial Sequence
  Quasi-synthetic sequence derived from human genome
IQTRRQRKLHFVVGGFAYLLPKTAVVLRCPARRVRKPLITW

SEQ ID NO: 33396 - protein, 41 aa, Artificial Sequence
  Quasi-synthetic sequence derived from human genome
RLKIKQILPTIYKRKNLSLFLSISLLIFWGSSLLGARLYWM

SEQ ID NO: 33397 - protein, 41 aa, Artificial Sequence
  Quasi-synthetic sequence derived from human genome
VRIKTSIFSLFRAPKLRMRVFGLCFVRFAITVPFYGLILNL

SEQ ID NO: 33398 - protein, 41 aa, Artificial Sequence
  Quasi-synthetic sequence derived from human genome
RTFRLLRVLKLVRFMPALRRQLVVLMKTMDNVATFCMLLML

SEQ ID NO: 33399 - protein, 41 aa, Artificial Sequence
  Quasi-synthetic sequence derived from human genome
FKKFYFHQHLCILKAKLGRPVTWNRQLRHFQGRKKALQIQK

SEQ ID NO: 33400 - protein, 41 aa, Artificial Sequence
  Quasi-synthetic sequence derived from human genome
IVSQRKQIKRKAPRGFLKRVFKRKKPQLRLEKSGDLLVRFH

SEQ ID NO: 33401 - protein, 41 aa, Artificial Sequence
  Quasi-synthetic sequence derived from human genome
KYLKVFYKFLNSNRHTIRHTGKKCFKCKKCVKSFCIRLHKT

SEQ ID NO: 33402 - protein, 41 aa, Artificial Sequence
  Quasi-synthetic sequence derived from human genome
KSVWYRIAFWLQWFNSFVNPLLYPLCHKRFQKAFLKIFCIK

SEQ ID NO: 33403 - protein, 41 aa, Artificial Sequence
  Quasi-synthetic sequence derived from human genome
RNILGLVLPLLIMVICYSGILKTLLRCRNEKKRHRAVRVIF

SEQ ID NO: 33404 - protein, 41 aa, Artificial Sequence
  Quasi-synthetic sequence derived from human genome
HIKNYIMNKDLLRRVLVLMNSKHTFLALCALRFMRRIIGLK

SEQ ID NO: 33405 - protein, 41 aa, Artificial Sequence
  Quasi-synthetic sequence derived from human genome
MWICQICRPRKKGRKLLQKKAAQIKRRYTNPIGRPKNRLKK

SEQ ID NO: 33406 - protein, 41 aa, Artificial Sequence
  Quasi-synthetic sequence derived from human genome
HWRGVSFVYNHYLFSGCFLVVLLAILLYLLRLRRIHRRTPR

SEQ ID NO: 33407 - protein, 41 aa, Artificial Sequence
  Quasi-synthetic sequence derived from human genome
FWARRASRTRLAAWARRALLSLRSPKARRGKARRRAAKLQS

SEQ ID NO: 33408 - protein, 41 aa, Artificial Sequence
  Quasi-synthetic sequence derived from human genome
WFRLSFVYNHYLFFACILVVLLAIFLYLLRLRRIHHRQTRA

SEQ ID NO: 33409 - protein, 41 aa, Artificial Sequence
  Quasi-synthetic sequence derived from human genome
LRIQFFLQMAVYRRRFVQQKRAAITLQHYFRTWQTRKQFLL

SEQ ID NO: 33410 - protein, 41 aa, Artificial Sequence
  Quasi-synthetic sequence derived from human genome
HRFLGRHFPRFYVLYTIFMKGLQMLWADAKKARRIKTNMWK

SEQ ID NO: 33411 - protein, 41 aa, Artificial Sequence
  Quasi-synthetic sequence derived from human genome
MMFVRNDCKVFRFCKSKCHKNFKKKRNPRKVRWTKAFRKAA

SEQ ID NO: 33412 - protein, 41 aa, Artificial Sequence
  Quasi-synthetic sequence derived from human genome
KMAGVIAGLLMFIIILLGVMLTIKRRRNAYSYSYYLKLAKK

SEQ ID NO: 33413 - protein, 41 aa, Artificial Sequence
  Quasi-synthetic sequence derived from human genome
LKLYRVLQLFLSRTAQRSALLSSGRLLRRLGLLLLPVLGFL

SEQ ID NO: 33414 - protein, 41 aa, Artificial Sequence
  Quasi-synthetic sequence derived from human genome
LFLTCISVHRCLGVLRPLRSLRWGRARYARRVAGAVWVLVL

SEQ ID NO: 33415 - protein, 41 aa, Artificial Sequence
  Quasi-synthetic sequence derived from human genome
KRKKKAWKRMVTKVCFVGDGFTRKPPKYERFIRPMGLRFKK

SEQ ID NO: 33416 - protein, 41 aa, Artificial Sequence
  Quasi-synthetic sequence derived from human genome
LFPEFRPGKVLRFLRLFGPGKNVPSVWRSARRKRKKKHREL

SEQ ID NO: 33417 - protein, 41 aa, Artificial Sequence
  Quasi-synthetic sequence derived from human genome
AVPLSVLILGLLIMFITIVFCAAGIVVLVLHRRRRYKKKQV

SEQ ID NO: 33418 - protein, 41 aa, Artificial Sequence
  Quasi-synthetic sequence derived from human genome
FNKDLRRNKAALLFWHILLLGPIVRCLHTIRNYHKWLKNLK

SEQ ID NO: 33419 - protein, 41 aa, Artificial Sequence
  Quasi-synthetic sequence derived from human genome
PVLAGVVGGVCFLGVAVLVSILAGCLLNRRRAARRRRKRLR

SEQ ID NO: 33420 - protein, 41 aa, Artificial Sequence
  Quasi-synthetic sequence derived from human genome
ILISSWFRGNMQKKCYGKIKASVLLIQAFVRGWKARKNYRK

SEQ ID NO: 33421 - protein, 41 aa, Artificial Sequence
  Quasi-synthetic sequence derived from human genome
QYLGLARKKSGILLLTLVSFLIFILFIIVQLFIMKLRKAHV

SEQ ID NO: 33422 - protein, 41 aa, Artificial Sequence
  Quasi-synthetic sequence derived from human genome
FRCILLRWARLLGFATVYGTVTLKLHRVLKVFLSRTAQRIP

SEQ ID NO: 33423 - protein, 41 aa, Artificial Sequence
  Quasi-synthetic sequence derived from human genome
CWKKYYEIVMLCGLLKMWEDLRLRVHGPFFPRILRRRKGKR

SEQ ID NO: 33424 - protein, 41 aa, Artificial Sequence
  Quasi-synthetic sequence derived from human genome
FYIRSYILNKDLLRKALILMNSKHTHLILCVLRFMRRMICL

SEQ ID NO: 33425 - protein, 41 aa, Artificial Sequence
  Quasi-synthetic sequence derived from human genome
LPRMQARMRGFQARKRYLRRRAALGQLNTILLVAQPLLQRR

SEQ ID NO: 33426 - protein, 41 aa, Artificial Sequence
  Quasi-synthetic sequence derived from human genome
LARQRGVGQQAMSLAILRVIRLVRVFRIFKLSRHSKGLQIL

SEQ ID NO: 33427 - protein, 41 aa, Artificial Sequence
  Quasi-synthetic sequence derived from human genome
LLALALVGVLILFMFRRLRQFRQAQPTPQYRFRKRDKVMFY

SEQ ID NO: 33428 - protein, 41 aa, Artificial Sequence
  Quasi-synthetic sequence derived from human genome
REIALFLILLATAVILGSAVLLFHFCIFHRRKMKAIRRSLK

SEQ ID NO: 33429 - protein, 41 aa, Artificial Sequence
  Quasi-synthetic sequence derived from human genome
LRGRRCHCLPFPKRGMQRWMLPLRRGARLLPLASSKNPRAR

SEQ ID NO: 33430 - protein, 41 aa, Artificial Sequence
  Quasi-synthetic sequence derived from human genome
PRLDAEVYKTARALRIVRFTKILSLLRLLRLSRLIRYIHQW

SEQ ID NO: 33431 - protein, 41 aa, Artificial Sequence
  Quasi-synthetic sequence derived from human genome
APLLYFLFICPFVLLLLLLISLLCLYWKARKLSTLRSNTRK

SEQ ID NO: 33432 - protein, 41 aa, Artificial Sequence
  Quasi-synthetic sequence derived from human genome
YRHWQIPLGRRFRSLKMWFVFRMYGVKGLQAYIRKHVQLSH

SEQ ID NO: 33433 - protein, 41 aa, Artificial Sequence
  Quasi-synthetic sequence derived from human genome
RKLKFFFMNPCEKFWARGRKPWKLAIQILKIAMVTIQYLQL

SEQ ID NO: 33434 - protein, 41 aa, Artificial Sequence
  Quasi-synthetic sequence derived from human genome
PRVFAWVYRHQARHKAVVLRCHAVLLARAHKARALARLLRQ

SEQ ID NO: 33435 - protein, 41 aa, Artificial Sequence
  Quasi-synthetic sequence derived from human genome
KGKKCIVLVTELMTSGTLKTYLKRFKVMKIKVLRSWCRQIL

SEQ ID NO: 33436 - protein, 41 aa, Artificial Sequence
  Quasi-synthetic sequence derived from human genome
LATLIQKIYRGWKCRTHFLLMKKSQIVIAAWYRRYAQQKRY

SEQ ID NO: 33437 - protein, 41 aa, Artificial Sequence
  Quasi-synthetic sequence derived from human genome
KDSQQKTVKKKIKPTLPLRIFINVSRFFCVQLKKMVRLMYI

SEQ ID NO: 33438 - protein, 41 aa, Artificial Sequence
  Quasi-synthetic sequence derived from human genome
CRRTRSGVGWKRVLRSLCHSRTRVPLLAAIYFLMIHVLLIL

SEQ ID NO: 33439 - protein, 41 aa, Artificial Sequence
  Quasi-synthetic sequence derived from human genome
KLSKRQLFFRKKLLHSSQMLRAVSLGQDRYRRRYWVLPYLA

SEQ ID NO: 33440 - protein, 41 aa, Artificial Sequence
  Quasi-synthetic sequence derived from human genome
IKRFLAKKQKQNRPIPQWIQMKPGSKIRYNSKRRHWRRTKL

SEQ ID NO: 33441 - protein, 41 aa, Artificial Sequence
  Quasi-synthetic sequence derived from human genome
MVWPALWELYRELGLFQGPALGLRNHLGRKLRRRKKKKAKR

SEQ ID NO: 33442 - protein, 41 aa, Artificial Sequence
  Quasi-synthetic sequence derived from human genome
QILRSHLIKATVIPNRVKMLPYFGIIRNRMMSTHKSKKKIR

SEQ ID NO: 33443 - protein, 41 aa, Artificial Sequence
  Quasi-synthetic sequence derived from human genome
VMLIQAAIRSWLTRKHIQRLHAAATVIKRAWQKWRIRMACL

SEQ ID NO: 33444 - protein, 41 aa, Artificial Sequence
  Quasi-synthetic sequence derived from human genome
LKFHIRRFIFLFFILVIGIYPSGHSLILILGNPKLKQNAKK

SEQ ID NO: 33445 - protein, 41 aa, Artificial Sequence
  Quasi-synthetic sequence derived from human genome
AKASRSKTRLKSQLLLQKYIAQRKWKKHFYVVTAANRLRKF

SEQ ID NO: 33446 - protein, 41 aa, Artificial Sequence
  Quasi-synthetic sequence derived from human genome
LPLVAMAAGGRWVRQQGPRVRRGISRLWLRVLLRLSPMAFR

SEQ ID NO: 33447 - protein, 41 aa, Artificial Sequence
  Quasi-synthetic sequence derived from human genome
LLRKVRAKETRKRALSRLKLKLNKDIVISVGIYNLVQKALK

SEQ ID NO: 33448 - protein, 41 aa, Artificial Sequence
  Quasi-synthetic sequence derived from human genome
SFSSTLVLIVLVTLIFCLIVLSLSTFHIHKRRMKKRKMQRA

SEQ ID NO: 33449 - protein, 41 aa, Artificial Sequence
  Quasi-synthetic sequence derived from human genome
KWRHHRRLLTPAFHFNILKPYIKIFSKSANIMHAKWQRLAM

SEQ ID NO: 33450 - protein, 41 aa, Artificial Sequence
  Quasi-synthetic sequence derived from human genome
LQWRRRHCCFAKMTWNAKRSLFRTHLIGVLSLVFLFAMFLF

SEQ ID NO: 33451 - protein, 41 aa, Artificial Sequence
  Quasi-synthetic sequence derived from human genome
KNWKIILCLFIIPLVGCGFVSFRKKPVDKHKKLLWYYVAFF

SEQ ID NO: 33452 - protein, 41 aa, Artificial Sequence
  Quasi-synthetic sequence derived from human genome
LKIKLAVRMDKPAHMKHSGYLYALGQKVWKRWKKRYFVLVQ

SEQ ID NO: 33453 - protein, 41 aa, Artificial Sequence
  Quasi-synthetic sequence derived from human genome
RALPTSRLDLACSLSWNVIRYSLQKLRLVRWLLKKVFQCRR

SEQ ID NO: 33454 - protein, 41 aa, Artificial Sequence
  Quasi-synthetic sequence derived from human genome
KRKHFRLVLRLVLRGGRELGTFHSRLIKVISKPSQKKQSLK

SEQ ID NO: 33455 - protein, 41 aa, Artificial Sequence
  Quasi-synthetic sequence derived from human genome
MRLRTKMPWKTCWRYLTSGGFFLLILMIFSKLLKHSVIVAI

SEQ ID NO: 33456 - protein, 41 aa, Artificial Sequence
  Quasi-synthetic sequence derived from human genome
KRRMSVGQQTWALLCKNCLKKWRMKRQTLLEWLFSFLLVLF

SEQ ID NO: 33457 - protein, 41 aa, Artificial Sequence
  Quasi-synthetic sequence derived from human genome
LGNAIRIRILCCLTFLVKVKSKALLKNRLLPPLLHTLFPIV

SEQ ID NO: 33458 - protein, 41 aa, Artificial Sequence
  Quasi-synthetic sequence derived from human genome
RKQVKTVRFQTPGRFSWFCKRRRAFWHTPRLPTLPKRVPRA

SEQ ID NO: 33459 - protein, 41 aa, Artificial Sequence
  Quasi-synthetic sequence derived from human genome
RCWIYNKTKMAFLLVGICFLCKLCTIIFTTIAFFIYKRRLN

SEQ ID NO: 33460 - protein, 41 aa, Artificial Sequence
  Quasi-synthetic sequence derived from human genome
RRGRLARCWARCRDWRRMALVSALLLMLFCVALWPVQCALK

SEQ ID NO: 33461 - protein, 41 aa, Artificial Sequence
  Quasi-synthetic sequence derived from human genome
WRRRHWAVKMVTCFIIGLLFPVFSVCYLIAPKSPLGLFIRK

SEQ ID NO: 33462 - protein, 41 aa, Artificial Sequence
  Quasi-synthetic sequence derived from human genome
LLGRLLIYKQGRKLFPIKLKNKKGLVSLIDLLVLFTQLIYY

SEQ ID NO: 33463 - protein, 41 aa, Artificial Sequence
  Quasi-synthetic sequence derived from human genome
LKLNLFGLVLPLLVMIICYTGIIKILLRRPNEKKSKAVRLI

SEQ ID NO: 33464 - protein, 41 aa, Artificial Sequence
  Quasi-synthetic sequence derived from human genome
RYYRLAPMRLYTLSKRHFVLVFVVFFICFGLTIFVGIRGPK

SEQ ID NO: 33465 - protein, 41 aa, Artificial Sequence
  Quasi-synthetic sequence derived from human genome
FALLSRGRRRRMHVLRRRWDLGSLCRALLTRGLAALGHSLK

SEQ ID NO: 33466 - protein, 41 aa, Artificial Sequence
  Quasi-synthetic sequence derived from human genome
HKPLREWFVIVIMATICFILLILSLICKIKLGPVRRKLKSS

SEQ ID NO: 33467 - protein, 41 aa, Artificial Sequence
  Quasi-synthetic sequence derived from human genome
SRFLLKCGFITIPWRCIKKCSPLMPRAAVPRFVQQKLYLFL

SEQ ID NO: 33468 - protein, 41 aa, Artificial Sequence
  Quasi-synthetic sequence derived from human genome
CWLLLVLVLVLLVSPRGCRARRGLRGLLMAHSQRLLFRIGY

SEQ ID NO: 33469 - protein, 41 aa, Artificial Sequence
  Quasi-synthetic sequence derived from human genome
KKLILKQALIVVLQWCFNHNFSVRLYALVALKKLWTVCKVL

SEQ ID NO: 33470 - protein, 41 aa, Artificial Sequence
  Quasi-synthetic sequence derived from human genome
LLVICLCYLLIVVKVRSAGRRVWAPSCQRRRRSERRVTRMV

SEQ ID NO: 33471 - protein, 41 aa, Artificial Sequence
  Quasi-synthetic sequence derived from human genome
LQNLRTAMRRQMRRHASRRGPSRRRLGRLWNRLFHRPRAPR

SEQ ID NO: 33472 - protein, 41 aa, Artificial Sequence
  Quasi-synthetic sequence derived from human genome
QRRLRLQQLATLIQKIYRGWRCRTHYQLMRKSQILISSWFR

SEQ ID NO: 33473 - protein, 41 aa, Artificial Sequence
  Quasi-synthetic sequence derived from human genome
RLRKNTVKFSLYRHFKNTLIFAVLASIVFMGWTTKTFRIAK

SEQ ID NO: 33474 - protein, 41 aa, Artificial Sequence
  Quasi-synthetic sequence derived from human genome
LLIYLRVATWNQILDPWVYILFRRAVLRRLQPRLSTRPRRS

SEQ ID NO: 33475 - protein, 41 aa, Artificial Sequence
  Quasi-synthetic sequence derived from human genome
WRGHNCRKNYGLMRLGFLRLQALHRSRKLHQQYRLARQRII

SEQ ID NO: 33476 - protein, 41 aa, Artificial Sequence
  Quasi-synthetic sequence derived from human genome
RAWRTSLLIALGTLLALVCVFVICRRYLVMQRLFPRIPHMK

SEQ ID NO: 33477 - protein, 41 aa, Artificial Sequence
  Quasi-synthetic sequence derived from human genome
MFCKAIRFSYPSIHPFILIWGNKKLKQTFLSVLRQVRYWVK

SEQ ID NO: 33478 - protein, 41 aa, Artificial Sequence
  Quasi-synthetic sequence derived from human genome
ARKAFAKKQQQLSALKVLQRNCAAYLKLRHWQWWRVFTKVK

SEQ ID NO: 33479 - protein, 41 aa, Artificial Sequence
  Quasi-synthetic sequence derived from human genome
RRVSKALMASMARRASRGPIAFWARRASRTRLAAWARRALL

SEQ ID NO: 33480 - protein, 41 aa, Artificial Sequence
  Quasi-synthetic sequence derived from human genome
LIIGLRKTFWFFFQRHKLKGTSFLLGGVVIVLLRWPLLGMF

SEQ ID NO: 33481 - protein, 41 aa, Artificial Sequence
  Quasi-synthetic sequence derived from human genome
RGLRGLLMAHSQRLLFRIGYSLYTRTWLGYLFYRQQLRRAR

SEQ ID NO: 33482 - protein, 41 aa, Artificial Sequence
  Quasi-synthetic sequence derived from human genome
RGYLARQRYQQMRRSLVKFRSLVHAYVSRRRYLKLRAEWRC

SEQ ID NO: 33483 - protein, 41 aa, Artificial Sequence
  Quasi-synthetic sequence derived from human genome
RRRQGWLKEIRKLQKSTHLLIRKLPFSRLAREICVKFTRGV

SEQ ID NO: 33484 - protein, 41 aa, Artificial Sequence
  Quasi-synthetic sequence derived from human genome
RYLRVKLTVRFRIPGLPGCILSFQLKVCFLPVMWLFILLSL

SEQ ID NO: 33485 - protein, 41 aa, Artificial Sequence
  Quasi-synthetic sequence derived from human genome
RHKLKEVRLFLKNYSKTRFGYRIKWRIICGNNSTVIFFHFL

SEQ ID NO: 33486 - protein, 41 aa, Artificial Sequence
  Quasi-synthetic sequence derived from human genome
LLTFFFFPICVVFAWVADRRLLFYKYVYKRYRAGKQRGMII

SEQ ID NO: 33487 - protein, 41 aa, Artificial Sequence
  Quasi-synthetic sequence derived from human genome
RFKHLKKLLLVHGHWCYSRLARMVVYYLYKNVCYVNLLFWY

SEQ ID NO: 33488 - protein, 41 aa, Artificial Sequence
  Quasi-synthetic sequence derived from human genome
VLLVRTDKRSDSLIRKKFRMMKIPKPILFGLNIAMKKQTKI

SEQ ID NO: 33489 - protein, 41 aa, Artificial Sequence
  Quasi-synthetic sequence derived from human genome
LLLLLPLLLLKLHLWPQLRWLPADLAFAVRALCCKRALRAR

SEQ ID NO: 33490 - protein, 41 aa, Artificial Sequence
  Quasi-synthetic sequence derived from human genome
LFKNKDHFQFTNLFLCGLLSKAKQKLLRHLVPAAALRRKRK

SEQ ID NO: 33491 - protein, 41 aa, Artificial Sequence
  Quasi-synthetic sequence derived from human genome
PQHKMLRLRLPNLKMVRLRVSFSAVVFKAVSDICKILNIRR

SEQ ID NO: 33492 - protein, 41 aa, Artificial Sequence
  Quasi-synthetic sequence derived from human genome
WVLLRSGYPLRILLPLRGEWMGRRGLPRNLAPGPPRRRYRK

SEQ ID NO: 33493 - protein, 41 aa, Artificial Sequence
  Quasi-synthetic sequence derived from human genome
VTRFLCGFLVPVLIITACYLTIVCKLQRNRLAKTKKPFKII

SEQ ID NO: 33494 - protein, 41 aa, Artificial Sequence
  Quasi-synthetic sequence derived from human genome
KKVMSLSYSLLTPLLNLLIYSLRNSEMKRALMKLWRRRVVL

SEQ ID NO: 33495 - protein, 41 aa, Artificial Sequence
  Quasi-synthetic sequence derived from human genome
RVFIKDMAPGKVVPMNCWGVYQAVRWLRWKASLIKLRALRR

SEQ ID NO: 33496 - protein, 41 aa, Artificial Sequence
  Quasi-synthetic sequence derived from human genome
ASGQKAPRPAARRKARRLLKTVLMILLAFLVCWGPLFGLLL

SEQ ID NO: 33497 - protein, 41 aa, Artificial Sequence
  Quasi-synthetic sequence derived from human genome
IAHLGVFPSKAERKITSRPFTRFRTAVRVVIAILRLRFLVK

SEQ ID NO: 33498 - protein, 41 aa, Artificial Sequence
  Quasi-synthetic sequence derived from human genome
IRIMRVLRIARVLKLLKMAVGMRALLDTVGNLGLLFMLLFF

SEQ ID NO: 33499 - protein, 41 aa, Artificial Sequence
  Quasi-synthetic sequence derived from human genome
KVQNKAASLIQGYWRRYSTRQRFLKLKYYSIILQSRIRMII

SEQ ID NO: 33500 - protein, 41 aa, Artificial Sequence
  Quasi-synthetic sequence derived from human genome
RQLALLLWKNYTLQKRKVLVTVLELFLPLLFSGILIWLRLK

SEQ ID NO: 33501 - protein, 41 aa, Artificial Sequence
  Quasi-synthetic sequence derived from human genome
HHTKALSSRRLFVRRGQPFTIILYFRAPVRAFLPALKKVAL

SEQ ID NO: 33502 - protein, 41 aa, Artificial Sequence
  Quasi-synthetic sequence derived from human genome
IIHILQIRKLRHRLSNFPRLPGILAPETVLLPFCYKVFRKK

SEQ ID NO: 33503 - protein, 41 aa, Artificial Sequence
  Quasi-synthetic sequence derived from human genome
RARAWIRLSLEKKLLSQHLKQLLSNQPLTKKLYKRYAFLRC

SEQ ID NO: 33504 - protein, 41 aa, Artificial Sequence
  Quasi-synthetic sequence derived from human genome
RRAIVFTRQLVTYIVVGVTLRPAILVIPCLLLIKCHLKLYR

SEQ ID NO: 33505 - protein, 41 aa, Artificial Sequence
  Quasi-synthetic sequence derived from human genome
RWARPFYLAFVFCLALGLLQAIKLYLRRQRLLRDLRPFPAP

SEQ ID NO: 33506 - protein, 41 aa, Artificial Sequence
  Quasi-synthetic sequence derived from human genome
RLAQARGAAKKAGLLMALARLCFLLGRLCSRRLKLSQARVY

SEQ ID NO: 33507 - protein, 41 aa, Artificial Sequence
  Quasi-synthetic sequence derived from human genome
VFYGFKNIFITMFATFFFFKLLIKVFLALLTHFYIVKGNRK

SEQ ID NO: 33508 - protein, 41 aa, Artificial Sequence
  Quasi-synthetic sequence derived from human genome
KHWMLHFPRITYPLVHLANWLCGLNLFWICKTCFRCLKRLK

SEQ ID NO: 33509 - protein, 41 aa, Artificial Sequence
  Quasi-synthetic sequence derived from human genome
GVGCRLSRALLTAVTNVLIFFWCLAFLWGLLILLKYRWRKL

SEQ ID NO: 33510 - protein, 41 aa, Artificial Sequence
  Quasi-synthetic sequence derived from human genome
LARFLLKRGLRNKRIGHFLFWFLRSEIAQSRHYQQRFAVIL

SEQ ID NO: 33511 - protein, 41 aa, Artificial Sequence
  Quasi-synthetic sequence derived from human genome
IRHMIRKNKYRPDLRMAAIRRASAILRSQKPVMVKRKRTRP

SEQ ID NO: 33512 - protein, 41 aa, Artificial Sequence
  Quasi-synthetic sequence derived from human genome
FLMIKRHRAACLIQAHYRGYKGRQVFLRQKSAALIIQKYIR

SEQ ID NO: 33513 - protein, 41 aa, Artificial Sequence
  Quasi-synthetic sequence derived from human genome
RKAFAKRQQQLTAMKVLQRNCAAYLKLRNWQWWRLFTKVKP

SEQ ID NO: 33514 - protein, 41 aa, Artificial Sequence
  Quasi-synthetic sequence derived from human genome
KKPRTFIIKLIKWLMIAIPATFVNSAIRYLECKLALAFRTR

SEQ ID NO: 33515 - protein, 41 aa, Artificial Sequence
  Quasi-synthetic sequence derived from human genome
LFPKSFFSSKAKVIYLMRNPRDVLVSGYFFWKNMKFIKKPK

SEQ ID NO: 33516 - protein, 41 aa, Artificial Sequence
  Quasi-synthetic sequence derived from human genome
RRHYYLLRQFKIFSDFRMNKAFVTWKLNVKRIKTEKSRSFL

SEQ ID NO: 33517 - protein, 41 aa, Artificial Sequence
  Quasi-synthetic sequence derived from human genome
VRLQSWVRMWCVRQRYCRLLNAVRIIQVYWRWHSCHSRVFI

SEQ ID NO: 33518 - protein, 41 aa, Artificial Sequence
  Quasi-synthetic sequence derived from human genome
AGVRGYLARRRIRLWHRGAMVIQATWRGYRVRRNLAHLCRA

SEQ ID NO: 33519 - protein, 41 aa, Artificial Sequence
  Quasi-synthetic sequence derived from human genome
VKRLHKVLRPFLLRRVKVDVEKQMPKKYEHVIRCRLSKRQR

SEQ ID NO: 33520 - protein, 41 aa, Artificial Sequence
  Quasi-synthetic sequence derived from human genome
KLHWWRFLVIWILFSAVTAFVTFRATRKPLVQTTPRLVYKW

SEQ ID NO: 33521 - protein, 41 aa, Artificial Sequence
  Quasi-synthetic sequence derived from human genome
LYYLIWKNYKKYIIIAFILIILIIFLVLFIYTLPGAISRRI

SEQ ID NO: 33522 - protein, 41 aa, Artificial Sequence
  Quasi-synthetic sequence derived from human genome
RFQAAPVPLLLMILKPVQKLFAIIVGRGIRKWWQALPPNKK

SEQ ID NO: 33523 - protein, 41 aa, Artificial Sequence
  Quasi-synthetic sequence derived from human genome
RSRSVVRRRSFSISPVRLRRSRTPLRRRFSRSPIRRKRSRS

SEQ ID NO: 33524 - protein, 41 aa, Artificial Sequence
  Quasi-synthetic sequence derived from human genome
RSKNWRLSVRCGGWPLRWLMENGFLPDPPRIRYRKKKRILK

SEQ ID NO: 33525 - protein, 41 aa, Artificial Sequence
  Quasi-synthetic sequence derived from human genome
HLCCRRRRARLRFMKQKFNIVCLKISGFTTCCCFQILQISR

SEQ ID NO: 33526 - protein, 41 aa, Artificial Sequence
  Quasi-synthetic sequence derived from human genome
LLLILRGQTRHQVRKGVAVRARPWRKNLQEVFGKRWLLGLL

SEQ ID NO: 33527 - protein, 41 aa, Artificial Sequence
  Quasi-synthetic sequence derived from human genome
FKSGKFIRIFQLSNNIRSVVLRHCKKRQSHLRLTLKNNVFL

SEQ ID NO: 33528 - protein, 41 aa, Artificial Sequence
  Quasi-synthetic sequence derived from human genome
KPRGQPNTALLSLVLMAGTFFIAFFLRKFKNSRFFPGRIRR

SEQ ID NO: 33529 - protein, 41 aa, Artificial Sequence
  Quasi-synthetic sequence derived from human genome
IVHSRKKYRFHKTRSRMTHRTPKVKKSPKVRKKSYLSRLML

SEQ ID NO: 33530 - protein, 41 aa, Artificial Sequence
  Quasi-synthetic sequence derived from human genome
ISIVSYLFAKSNTVYNPVIYVFMIRKFRRSLLQLLCLRLLR

SEQ ID NO: 33531 - protein, 41 aa, Artificial Sequence
  Quasi-synthetic sequence derived from human genome
LGIFIYQLCNNRKSFRLRRRDLLLGFNKRAIDKCWKIRHFP

SEQ ID NO: 33532 - protein, 41 aa, Artificial Sequence
  Quasi-synthetic sequence derived from human genome
LAKKMLRKALKLLNRIFPYNLISLFLHIHVEKNRHFHYVNR

SEQ ID NO: 33533 - protein, 41 aa, Artificial Sequence
  Quasi-synthetic sequence derived from human genome
LRFKRTHIKMKKQPKGYGLRCHRAIITICRLIGIKDMYAKV

SEQ ID NO: 33534 - protein, 41 aa, Artificial Sequence
  Quasi-synthetic sequence derived from human genome
KLIRRRPFRQIQVLEPLNLLITISGHKNRLRVYHLTWLRNK

SEQ ID NO: 33535 - protein, 41 aa, Artificial Sequence
  Quasi-synthetic sequence derived from human genome
AKVRYVKLARSLKTYGVSFFLVKEKMKGKNKLVPRLLGITK

SEQ ID NO: 33536 - protein, 41 aa, Artificial Sequence
  Quasi-synthetic sequence derived from human genome
AKVKYVKLARSLRTYGVSFFLVKEKMKGKNKLVPRLLGITK

SEQ ID NO: 33537 - protein, 41 aa, Artificial Sequence
  Quasi-synthetic sequence derived from human genome
RRLQTQVFKLGLAKSIHHARVLIRQRHIRVRKQVVNIPSFI

SEQ ID NO: 33538 - protein, 41 aa, Artificial Sequence
  Quasi-synthetic sequence derived from human genome
LQLLLWKNVTLKRRSPWVLAFEIFIPLVLFFILLGLRQKKP

SEQ ID NO: 33539 - protein, 41 aa, Artificial Sequence
  Quasi-synthetic sequence derived from human genome
ILLVVAVFCILWNWNKRKKRQVPYLRVTVMPLLTLPQTRQR

SEQ ID NO: 33540 - protein, 41 aa, Artificial Sequence
  Quasi-synthetic sequence derived from human genome
RATVRALWFWAFSLQAKVWATWLAFVLERRRKKARLQWALQ

SEQ ID NO: 33541 - protein, 41 aa, Artificial Sequence
  Quasi-synthetic sequence derived from human genome
ARKAFAKRQQQLTAMKVIQRNCAAYLKLRNWQWWRLFTKVK

SEQ ID NO: 33542 - protein, 41 aa, Artificial Sequence
  Quasi-synthetic sequence derived from human genome
LKRSIKLLSLIKWKGSKSSKLNSKFWKHLVYEMPIKKKEML

SEQ ID NO: 33543 - protein, 41 aa, Artificial Sequence
  Quasi-synthetic sequence derived from human genome
LPGTFFFIIGLWWCTKSILKYICKKQKRTCYLGSKTLFYRL

SEQ ID NO: 33544 - protein, 41 aa, Artificial Sequence
  Quasi-synthetic sequence derived from human genome
RKVRRKEPKSQDIYLRLLVKLYRFLARRTNSTFNQVVLKRL

SEQ ID NO: 33545 - protein, 41 aa, Artificial Sequence
  Quasi-synthetic sequence derived from human genome
FRKMMERRESIFCIQYNIRAFMNVKHWPWMKLYFKIKPLLK

SEQ ID NO: 33546 - protein, 41 aa, Artificial Sequence
  Quasi-synthetic sequence derived from human genome
LLSVLAMFFLLVLILSSVFLFRLFKRRQGRIFPEGKMWKLT

SEQ ID NO: 33547 - protein, 41 aa, Artificial Sequence
  Quasi-synthetic sequence derived from human genome
LLLKKLKAWNDIKKVYASQRMRAGKGKMRNRRRIQRRGPCI

SEQ ID NO: 33548 - protein, 41 aa, Artificial Sequence
  Quasi-synthetic sequence derived from human genome
FGLLLKKIMAILIKRFHHTRRNWKGLIAQVILPIVFVTTAM

SEQ ID NO: 33549 - protein, 41 aa, Artificial Sequence
  Quasi-synthetic sequence derived from human genome
RARRRRRRRRRRDLLLSQLCFLASVALLLWSLSSLREQKEL

SEQ ID NO: 33550 - protein, 41 aa, Artificial Sequence
  Quasi-synthetic sequence derived from human genome
WRFLRIVCKTARRDLFGLSVLIRVRLELRRHQRAGHTIPRI

SEQ ID NO: 33551 - protein, 41 aa, Artificial Sequence
  Quasi-synthetic sequence derived from human genome
RCRRLRAIYTIMRWFRRHKVRAHLAELQRRFQAARQPPLYG

SEQ ID NO: 33552 - protein, 41 aa, Artificial Sequence
  Quasi-synthetic sequence derived from human genome
KKAYVVCTFVFGYLLPLLLICFCYAKVLNHLHKKLKNMSKK

SEQ ID NO: 33553 - protein, 41 aa, Artificial Sequence
  Quasi-synthetic sequence derived from human genome
RVALARVSSVKLISKAKIRTVKMTFIIVLAFIVCWTPFFFV

SEQ ID NO: 33554 - protein, 41 aa, Artificial Sequence
  Quasi-synthetic sequence derived from human genome
GWVHANRPKRLLLVLVSAFFIFWSPFNVVLLVHLWRRVMLK

SEQ ID NO: 33555 - protein, 41 aa, Artificial Sequence
  Quasi-synthetic sequence derived from human genome
FLLPFLAVVASYSDIGRRLQARRFRRSRRTGRLVVLIILTF

SEQ ID NO: 33556 - protein, 41 aa, Artificial Sequence
  Quasi-synthetic sequence derived from human genome
RPALKLRSWPLTVLYYLLPFGALRPLSRVGWRPVSRVALYK

SEQ ID NO: 33557 - protein, 41 aa, Artificial Sequence
  Quasi-synthetic sequence derived from human genome
FFCFLLGKCFKKGLKGKGFVLLVKLACIVVASFVLCWLPFF

SEQ ID NO: 33558 - protein, 41 aa, Artificial Sequence
  Quasi-synthetic sequence derived from human genome
KGSRRCKKRMFKFHQMKHIFEILDKMRCLRKRSTVSFLGVL

SEQ ID NO: 33559 - protein, 41 aa, Artificial Sequence
  Quasi-synthetic sequence derived from human genome
RLVVYKIVYMFLFLLCLTLFQVYYSLWRKLLKAFWWLVVAY

SEQ ID NO: 33560 - protein, 41 aa, Artificial Sequence
  Quasi-synthetic sequence derived from human genome
VFLLLVIKSSPSNYVRRELLRRTWGRERKVRGLQLRLLFLV

SEQ ID NO: 33561 - protein, 41 aa, Artificial Sequence
  Quasi-synthetic sequence derived from human genome
YKKKLWKKTPARKKRLREFVFCNKTQSKLLDKMTTSFWKRR

SEQ ID NO: 33562 - protein, 41 aa, Artificial Sequence
  Quasi-synthetic sequence derived from human genome
LCAILKQKAPQQYRIRAKLRSYKPRRLFQSVKLHCPKCHLL

SEQ ID NO: 33563 - protein, 41 aa, Artificial Sequence
  Quasi-synthetic sequence derived from human genome
FLVLLFSQYARNVKFPLPIYKSKKGWTAYKLQLFKMFPIIL

SEQ ID NO: 33564 - protein, 41 aa, Artificial Sequence
  Quasi-synthetic sequence derived from human genome
VKILRVLRVLRPLRAINRAKGLKHVVQCMFVAISTIGNIVL

SEQ ID NO: 33565 - protein, 41 aa, Artificial Sequence
  Quasi-synthetic sequence derived from human genome
TFFSHFFYLSLFFWMLFKALLIIYGILVIFRRMMKSRMMVI

SEQ ID NO: 33566 - protein, 41 aa, Artificial Sequence
  Quasi-synthetic sequence derived from human genome
SLWCWWRRRGAAKAGPSGCRRWGQAISKSKLSRRWRRWNRF

SEQ ID NO: 33567 - protein, 41 aa, Artificial Sequence
  Quasi-synthetic sequence derived from human genome
FYRNKLKYLAFLRKRMNTNPSRGPYHFRAPSRIFWRTVRGM

SEQ ID NO: 33568 - protein, 41 aa, Artificial Sequence
  Quasi-synthetic sequence derived from human genome
FTKLRRAAILRRERQQKAPRHPLADILHRGCPLLRRWLCRR

SEQ ID NO: 33569 - protein, 41 aa, Artificial Sequence
  Quasi-synthetic sequence derived from human genome
YWLSLLYKRLIGPKVLAVHVAGLQRKPRPGRVIRDKLRIYA

SEQ ID NO: 33570 - protein, 41 aa, Artificial Sequence
  Quasi-synthetic sequence derived from human genome
LLIIRSLRQGLRVEKRLKTKAVRMIAIVLAIFLVCFVPYHV

SEQ ID NO: 33571 - protein, 41 aa, Artificial Sequence
  Quasi-synthetic sequence derived from human genome
ILVGVLLLFVLLLVVRRRRREQRLKRLRDAKSLAEMLMSKN

SEQ ID NO: 33572 - protein, 41 aa, Artificial Sequence
  Quasi-synthetic sequence derived from human genome
KKRNSTLYITMLLIVPVIVAGAIIVLLLYLKRLKIIIFPPI

SEQ ID NO: 33573 - protein, 41 aa, Artificial Sequence
  Quasi-synthetic sequence derived from human genome
SHRHGFRCQFANGIFQLWFHFKRYRYRRPGPCWRPIRHCRR

SEQ ID NO: 33574 - protein, 41 aa, Artificial Sequence
  Quasi-synthetic sequence derived from human genome
LRRRQQLARQARMKKATRFIMVVAIVFITCYLPSVSARLYF

SEQ ID NO: 33575 - protein, 41 aa, Artificial Sequence
  Quasi-synthetic sequence derived from human genome
YLQRLLLVHGRWSYIRMCKFLRYFFYKNFAFTLVHFWYSFF

SEQ ID NO: 33576 - protein, 41 aa, Artificial Sequence
  Quasi-synthetic sequence derived from human genome
LVLGFVLPVCTICVLYTDLLRRLRAVRLRSGAKALGKARRK

SEQ ID NO: 33577 - protein, 41 aa, Artificial Sequence
  Quasi-synthetic sequence derived from human genome
KIVNFSRLIFHHLKRKAKSVVLVIVLGSLFFLVCHLVMKHT

SEQ ID NO: 33578 - protein, 41 aa, Artificial Sequence
  Quasi-synthetic sequence derived from human genome
LQRVLLLFRAAQCSFPVAQWYILQLRWARKVMQKIRMKGSL

SEQ ID NO: 33579 - protein, 41 aa, Artificial Sequence
  Quasi-synthetic sequence derived from human genome
LLVICLCYLLIVVKVRAAGVRVGCVRRRSERKVTRMVLVVV

SEQ ID NO: 33580 - protein, 41 aa, Artificial Sequence
  Quasi-synthetic sequence derived from human genome
DKLSRALRYYYNKRILHKTKGKRFTYKFNFNKLVLVNYPFI

SEQ ID NO: 33581 - protein, 41 aa, Artificial Sequence
  Quasi-synthetic sequence derived from human genome
QRPKRYFTIVIISSSLLLGLIVLLLISYVMWKAGFFKRQYK

SEQ ID NO: 33582 - protein, 41 aa, Artificial Sequence
  Quasi-synthetic sequence derived from human genome
FQLEFFMPLGIILFCSFKIVWSLRRRQQLARQARMKKATRF

SEQ ID NO: 33583 - protein, 41 aa, Artificial Sequence
  Quasi-synthetic sequence derived from human genome
LLKKLGIKLQVLINLGLVYKVQQHNGIIFQFVAFIKRRQRA

SEQ ID NO: 33584 - protein, 41 aa, Artificial Sequence
  Quasi-synthetic sequence derived from human genome
RVKAAPGPKAALAVIRGGATRAAGVFYPWRFRLLCLLRRWL

SEQ ID NO: 33585 - protein, 41 aa, Artificial Sequence
  Quasi-synthetic sequence derived from human genome
LRPIGLLRAQSLEWFYNNVKSRFKRFGSAKVLKNLYRKHRL

SEQ ID NO: 33586 - protein, 41 aa, Artificial Sequence
  Quasi-synthetic sequence derived from human genome
LKLPVLPPKLTLFNAKYNKIKSRGIKANAFKKLNNLTFLYL

SEQ ID NO: 33587 - protein, 41 aa, Artificial Sequence
  Quasi-synthetic sequence derived from human genome
VFHGAIMSVFPVVMYFWKRFCFWKATRSYLQYRGKKFKDRK

SEQ ID NO: 33588 - protein, 41 aa, Artificial Sequence
  Quasi-synthetic sequence derived from human genome
RLARHDRGNYVRLNMKQKHYVRGRALRSRLLRKQAWKQKWR

SEQ ID NO: 33589 - protein, 41 aa, Artificial Sequence
  Quasi-synthetic sequence derived from human genome
LRLDKLRQSCVMVQKHMRGWLQRKKFLRERRAALIIQQYFR

SEQ ID NO: 33590 - protein, 41 aa, Artificial Sequence
  Quasi-synthetic sequence derived from human genome
LKRFKVMKPKVLRSWCRQILKGLLFLHTRTPPIIHRDLKCD

SEQ ID NO: 33591 - protein, 41 aa, Artificial Sequence
  Quasi-synthetic sequence derived from human genome
KYFLPRAYAVAIPLAAGLLLLLFVGLFISYVMLKTKRVTKK

SEQ ID NO: 33592 - protein, 41 aa, Artificial Sequence
  Quasi-synthetic sequence derived from human genome
MRVIQVWFQNRRSKERRMKQLSALGARRHAFFRSPRRMRPL

SEQ ID NO: 33593 - protein, 41 aa, Artificial Sequence
  Quasi-synthetic sequence derived from human genome
WRRKHWVVKLLTCMTIGFLFPMLSIAYLISPRSNLGLFIKK

SEQ ID NO: 33594 - protein, 41 aa, Artificial Sequence
  Quasi-synthetic sequence derived from human genome
GRKLITKYNRRELTDKLLIFLALALFLATVLYIVKKRLFPF

SEQ ID NO: 33595 - protein, 41 aa, Artificial Sequence
  Quasi-synthetic sequence derived from human genome
ARMWRIRRRYCQVLNAVRIIQAYWRCRSCASRGFIKGQYRV

SEQ ID NO: 33596 - protein, 41 aa, Artificial Sequence
  Quasi-synthetic sequence derived from human genome
VRGYLARRRIRLWHRGAMVIQATWRGYRVRRNLAHLCRATT

SEQ ID NO: 33597 - protein, 41 aa, Artificial Sequence
  Quasi-synthetic sequence derived from human genome
LLCFYLKYLNMYASICFLTCISLQRCFFLLKPFRARDWKRR

SEQ ID NO: 33598 - protein, 41 aa, Artificial Sequence
  Quasi-synthetic sequence derived from human genome
PRRPRRRASRAFCPRPCALPGRPGLTLLCRPRCRRQPRLRL

SEQ ID NO: 33599 - protein, 41 aa, Artificial Sequence
  Quasi-synthetic sequence derived from human genome
QFKFLQRLLLVHGRWSYLRMCKFLCYFFYKNFAFTMVHFWF

SEQ ID NO: 33600 - protein, 41 aa, Artificial Sequence
  Quasi-synthetic sequence derived from human genome
IIKILLRRPNEKKSKAVRLIFVIMIIFFLFWTPYNLTILIS

SEQ ID NO: 33601 - protein, 41 aa, Artificial Sequence
  Quasi-synthetic sequence derived from human genome
WRSPLLLLAMWGPQAPPCLCRKRGRGACIKCERLRPRIRRR

SEQ ID NO: 33602 - protein, 41 aa, Artificial Sequence
  Quasi-synthetic sequence derived from human genome
LFKFFFWIGYCNSSLNPVIYTVFNQDFRRSFKHILFRRRRR

SEQ ID NO: 33603 - protein, 41 aa, Artificial Sequence
  Quasi-synthetic sequence derived from human genome
VARKFASIARNQVRKKRQMAARERKVTRTIFAILLAFILTW

SEQ ID NO: 33604 - protein, 41 aa, Artificial Sequence
  Quasi-synthetic sequence derived from human genome
RFIKYFVKGRQAVLSMVRKAKYRELLLSELLGRRAPVVVRL

SEQ ID NO: 33605 - protein, 41 aa, Artificial Sequence
  Quasi-synthetic sequence derived from human genome
ILGLLLLRWRRPALHRPIKVNLLIPVAYLVFWAFLLVFSFI

SEQ ID NO: 33606 - protein, 41 aa, Artificial Sequence
  Quasi-synthetic sequence derived from human genome
FRVAKKRAPKVLGTTLVVGLLAGVGYFAFMLFRKRLGSMIL

SEQ ID NO: 33607 - protein, 41 aa, Artificial Sequence
  Quasi-synthetic sequence derived from human genome
KVQNKAASLIQAMWRRYRAKKYLCKVKAACKIQAWYRCWRA

SEQ ID NO: 33608 - protein, 41 aa, Artificial Sequence
  Quasi-synthetic sequence derived from human genome
TILIILTGRHRGKRVVFLKQLASGLLLVTGPLVLNRVPLRR

SEQ ID NO: 33609 - protein, 41 aa, Artificial Sequence
  Quasi-synthetic sequence derived from human genome
FLWLWTSFNTAFLALQSLRFGFGFRRGRSFLLRSWHHLMKR

SEQ ID NO: 33610 - protein, 41 aa, Artificial Sequence
  Quasi-synthetic sequence derived from human genome
RFSLAVLYQACCVALLLWLALLLSIQRRLPRERKIKYSKLL

SEQ ID NO: 33611 - protein, 41 aa, Artificial Sequence
  Quasi-synthetic sequence derived from human genome
VSTWLAIILLIFISLFPEILLIVLKNVRRRSARRNLSCRRA

SEQ ID NO: 33612 - protein, 41 aa, Artificial Sequence
  Quasi-synthetic sequence derived from human genome
WVKFIIGYLFPLLTMSICYLCLIFKVKKRSILISSRHFWTI

SEQ ID NO: 33613 - protein, 41 aa, Artificial Sequence
  Quasi-synthetic sequence derived from human genome
FKRSYNYKTIVKKILAKLKRARSKKLDNFQSEKKVFKKSFL

SEQ ID NO: 33614 - protein, 41 aa, Artificial Sequence
  Quasi-synthetic sequence derived from human genome
TFKIKQFLAKKQKQNRPIPQWIRMKTGNKIRYNSKRRHWKR

SEQ ID NO: 33615 - protein, 41 aa, Artificial Sequence
  Quasi-synthetic sequence derived from human genome
MHILHISVMGGLIALLLLLLVFTVALYAQRRWQKRRRIPQK

SEQ ID NO: 33616 - protein, 41 aa, Artificial Sequence
  Quasi-synthetic sequence derived from human genome
FHLLFGLEIRMRRIVFAGVILFRLLGVILFRLLGVILFGRL

SEQ ID NO: 33617 - protein, 41 aa, Artificial Sequence
  Quasi-synthetic sequence derived from human genome
VAKKTSFKDCIPRSFRRHIRQHSALTRLRLRNVFRRFLRDF

SEQ ID NO: 33618 - protein, 41 aa, Artificial Sequence
  Quasi-synthetic sequence derived from human genome
YHKHYILFCTTVFTLLLLSIVILYCRIYSLVRTRSRRLTFR

SEQ ID NO: 33619 - protein, 41 aa, Artificial Sequence
  Quasi-synthetic sequence derived from human genome
TRIDSEVYKTARALRIVRFTKILSLLRLLRLSRLIRYIHQW

SEQ ID NO: 33620 - protein, 41 aa, Artificial Sequence
  Quasi-synthetic sequence derived from human genome
LRLPQKFLFLLFLSGLVTLCFGALFLLPHSSRLKRLFLAPR

SEQ ID NO: 33621 - protein, 41 aa, Artificial Sequence
  Quasi-synthetic sequence derived from human genome
FLSYARTSIRASLTFNRGFKAGRNMRRKLFGVLRLKCHSLF

SEQ ID NO: 33622 - protein, 41 aa, Artificial Sequence
  Quasi-synthetic sequence derived from human genome
RAQVRRILQRVPGKQRFGIYRFLPFFFVLGGTMEWIMIKVR

SEQ ID NO: 33623 - protein, 41 aa, Artificial Sequence
  Quasi-synthetic sequence derived from human genome
KAKRKVVKMMIIVVMTFAICWLPYHIYFILTAIYQQLNRWK

SEQ ID NO: 33624 - protein, 41 aa, Artificial Sequence
  Quasi-synthetic sequence derived from human genome
VQLFSKKFKLWLLNALEGVPALLQISKLKEVTLFVKRLRRK

SEQ ID NO: 33625 - protein, 41 aa, Artificial Sequence
  Quasi-synthetic sequence derived from human genome
PKRRKKRYLRHDKPPYTYLAMIALVIQAAPSRRLKLAQIIR

SEQ ID NO: 33626 - protein, 41 aa, Artificial Sequence
  Quasi-synthetic sequence derived from human genome
KKRVRFTKRKQKVPGFPKRFTVKPVVLGFPYFHSGRHFWEI

SEQ ID NO: 33627 - protein, 41 aa, Artificial Sequence
  Quasi-synthetic sequence derived from human genome
ILKMVGPGFLSLGLMMLVCGLVWVPIIKKKQKHRQKSNFLR

SEQ ID NO: 33628 - protein, 41 aa, Artificial Sequence
  Quasi-synthetic sequence derived from human genome
RAGRPGLGAGLRLPRLLSPPLRPRLLLLLLLLSPPLLLLLL

SEQ ID NO: 33629 - protein, 41 aa, Artificial Sequence
  Quasi-synthetic sequence derived from human genome
ILIQRKYRAHLCTKHHLQFLQVQNAVIKIQSSYRRWMIRKR

SEQ ID NO: 33630 - protein, 41 aa, Artificial Sequence
  Quasi-synthetic sequence derived from human genome
KVMLKSIKTRLGRRVPAAPPALRRNLLLQAWKCVCNWASRL

SEQ ID NO: 33631 - protein, 41 aa, Artificial Sequence
  Quasi-synthetic sequence derived from human genome
MRRTRRPRFVLMNKMDDLNLHYRFLNWRRRIREIREVRAFR

SEQ ID NO: 33632 - protein, 41 aa, Artificial Sequence
  Quasi-synthetic sequence derived from human genome
VLRMMRIFWVIKLARHFIGLQTLGLTLKRCYREMVMLLVFI

SEQ ID NO: 33633 - protein, 41 aa, Artificial Sequence
  Quasi-synthetic sequence derived from human genome
IIIQKHCRGYLVRSLYQLIRMATITMQAYSRGFLARRRYRK

SEQ ID NO: 33634 - protein, 41 aa, Artificial Sequence
  Quasi-synthetic sequence derived from human genome
LLRRWKHWLLLLGICCPKPHGRVSSRLRLSRSLGHFFHSAF

SEQ ID NO: 33635 - protein, 41 aa, Artificial Sequence
  Quasi-synthetic sequence derived from human genome
FLGKTMGKLKILSRGSQTKLLCYMMLFSLFVFFIIYWIIKL

SEQ ID NO: 33636 - protein, 41 aa, Artificial Sequence
  Quasi-synthetic sequence derived from human genome
RSGGRGRPRLRLGERGLMEPLLPPKRRLLPRVRLLPLLLAL

SEQ ID NO: 33637 - protein, 41 aa, Artificial Sequence
  Quasi-synthetic sequence derived from human genome
LVRGWLVRKRFLEQRAKIRLLHFTAAAYYHLNAVRIQRAYK

SEQ ID NO: 33638 - protein, 41 aa, Artificial Sequence
  Quasi-synthetic sequence derived from human genome
FSQLRLTPGLRKVLFATALGTVALALAAHQLKRRRRRKKQV

SEQ ID NO: 33639 - protein, 41 aa, Artificial Sequence
  Quasi-synthetic sequence derived from human genome
FRSRSKRRHRTVKLIFAIVVAYFLSWGPYNFTLFLQTLFRT

SEQ ID NO: 33640 - protein, 41 aa, Artificial Sequence
  Quasi-synthetic sequence derived from human genome
FFVRLGPMALAFKVRGLLDCKHSWKRLKDIRKIFPGKKSVV

SEQ ID NO: 33641 - protein, 41 aa, Artificial Sequence
  Quasi-synthetic sequence derived from human genome
LKLKNAATLIQRHWRGHNCRKNYGLMRLGFLRLQALHRSRK

SEQ ID NO: 33642 - protein, 41 aa, Artificial Sequence
  Quasi-synthetic sequence derived from human genome
LPVLGKLKRNMMPWALQKKREIHMAKAHRRRAARSALPMRL

SEQ ID NO: 33643 - protein, 41 aa, Artificial Sequence
  Quasi-synthetic sequence derived from human genome
RQRQMDRHAKIKRAITFIMVVAIVFVICFLPSVVVRIRIFW

SEQ ID NO: 33644 - protein, 41 aa, Artificial Sequence
  Quasi-synthetic sequence derived from human genome
LLRSARRRRRGRTDGRRFLLRRAVPGHLGLARARVERAWLA

SEQ ID NO: 33645 - protein, 41 aa, Artificial Sequence
  Quasi-synthetic sequence derived from human genome
RLRFAVFTGAFHALSFLLSFVVLCCTYLKVLKVARFHCKRI

SEQ ID NO: 33646 - protein, 41 aa, Artificial Sequence
  Quasi-synthetic sequence derived from human genome
FLVFLIPFLHFIIFLFTLRCLEWKFGKKSMRKDPFFRISPR

SEQ ID NO: 33647 - protein, 41 aa, Artificial Sequence
  Quasi-synthetic sequence derived from human genome
MARGGRGRRLGLALGLLLALVLAPRVLRAKPTVRKERVVRP

SEQ ID NO: 33648 - protein, 41 aa, Artificial Sequence
  Quasi-synthetic sequence derived from human genome
RKNLKSLIIVHPSWFIRTLLAVTRPFISSKFSQKIRYVFNL

SEQ ID NO: 33649 - protein, 41 aa, Artificial Sequence
  Quasi-synthetic sequence derived from human genome
WRKTVCHNGVLGLSRLLFFLLGFLRIRVRGQRASRLQAPVL

SEQ ID NO: 33650 - protein, 41 aa, Artificial Sequence
  Quasi-synthetic sequence derived from human genome
RISITFFRLFRVMRLVKLLSRGEGIRTLLWTFIKSFQALPY

SEQ ID NO: 33651 - protein, 41 aa, Artificial Sequence
  Quasi-synthetic sequence derived from human genome
FTCQRILFLKPSCMLEVITWPIQAFVKRKVIIFLKKCLLCK

SEQ ID NO: 33652 - protein, 41 aa, Artificial Sequence
  Quasi-synthetic sequence derived from human genome
LWGRRKCKPQMNYDKLSRALRYYYNKRILHKTKGKRFTYKF

SEQ ID NO: 33653 - protein, 41 aa, Artificial Sequence
  Quasi-synthetic sequence derived from human genome
FRIIQTLFSCKNHKKAKAIKLILLVVIVFFLFWTPYNVMIF

SEQ ID NO: 33654 - protein, 41 aa, Artificial Sequence
  Quasi-synthetic sequence derived from human genome
VYKTARALRIVRFTKILSLLRLLRLSRLIRYIHQWEEIFHM

SEQ ID NO: 33655 - protein, 41 aa, Artificial Sequence
  Quasi-synthetic sequence derived from human genome
FNDIVKQGYVKIRSRKLGIFRRCWLVFKKASSKGPRRLEKF

SEQ ID NO: 33656 - protein, 41 aa, Artificial Sequence
  Quasi-synthetic sequence derived from human genome
GVLLTLLLIAFIFLIIKSYRKYRRERLPISPGPLLRWVPLL

SEQ ID NO: 33657 - protein, 41 aa, Artificial Sequence
  Quasi-synthetic sequence derived from human genome
RPLVLTAWGLALEMAWVEPAWAAHWLMRRRRRKQRKKKAWI

SEQ ID NO: 33658 - protein, 41 aa, Artificial Sequence
  Quasi-synthetic sequence derived from human genome
IVHARKKYRFHKTRSHVTHRTPKVKKSPKVRKKSYLSRLML

SEQ ID NO: 33659 - protein, 41 aa, Artificial Sequence
  Quasi-synthetic sequence derived from human genome
KKRKKGLRIKGKRRRKKLILAKKFSKDLGSGRPVADAPALL

SEQ ID NO: 33660 - protein, 41 aa, Artificial Sequence
  Quasi-synthetic sequence derived from human genome
MAKLWFKFQRYFRRKPVRFFTFLALYLTAGSLVFLHSGFVG

SEQ ID NO: 33661 - protein, 41 aa, Artificial Sequence
  Quasi-synthetic sequence derived from human genome
FKHKHKDCVLYLLSKMWSTVSFPKISVPMRIYIKIKQWILR

SEQ ID NO: 33662 - protein, 41 aa, Artificial Sequence
  Quasi-synthetic sequence derived from human genome
LFRAARLIKLLRQGYTIRILLWTFVQSFKALPYVCLLIAML

SEQ ID NO: 33663 - protein, 41 aa, Artificial Sequence
  Quasi-synthetic sequence derived from human genome
MRESCIKLQAFVRGYLVRKQMRLQRKAVISLQSYFRMRKAR

SEQ ID NO: 33664 - protein, 41 aa, Artificial Sequence
  Quasi-synthetic sequence derived from human genome
LAPWPRPPPRRFSPPRRMLPPPPMWRRSPPRMRRRSRSPRR

SEQ ID NO: 33665 - protein, 41 aa, Artificial Sequence
  Quasi-synthetic sequence derived from human genome
RRWKKKQLRRPSLLLLGCCSFGIMAPSLWKGLVGIGLFALA

SEQ ID NO: 33666 - protein, 41 aa, Artificial Sequence
  Quasi-synthetic sequence derived from human genome
PLRFYPASPRRLHRASTPGPAWGWLLRRRRWAALLVLGLLV

SEQ ID NO: 33667 - protein, 41 aa, Artificial Sequence
  Quasi-synthetic sequence derived from human genome
RGACRIYNSTYLGRAFFGLKVALIFPVLVLLTVFIFVVRKK

SEQ ID NO: 33668 - protein, 41 aa, Artificial Sequence
  Quasi-synthetic sequence derived from human genome
LRRIRAAVVLQKHYRMQRARQAYQRVRRAAVVIQAFTRAMF

SEQ ID NO: 33669 - protein, 41 aa, Artificial Sequence
  Quasi-synthetic sequence derived from human genome
GRVQGWALTRQQLQALLLKRFLLARRSRRGLFAQIVLPALF

SEQ ID NO: 33670 - protein, 41 aa, Artificial Sequence
  Quasi-synthetic sequence derived from human genome
YLYHRELTKIPIFSLFRKWKAFSVWRKNVRSKKITGCQKSL

SEQ ID NO: 33671 - protein, 41 aa, Artificial Sequence
  Quasi-synthetic sequence derived from human genome
IIYTFILGFLVPLTIICLCYLFIIIKVKSSGIRVGSSKRKK

SEQ ID NO: 33672 - protein, 41 aa, Artificial Sequence
  Quasi-synthetic sequence derived from human genome
RLILSKILKKRRQAALEAFSRKEWAAVTLQSQARMWRIRRR

SEQ ID NO: 33673 - protein, 41 aa, Artificial Sequence
  Quasi-synthetic sequence derived from human genome
KSSWVKRHRSSFRNRFPLLKVLILQRNKLSDTPKGLWKLKS

SEQ ID NO: 33674 - protein, 41 aa, Artificial Sequence
  Quasi-synthetic sequence derived from human genome
LPFVLAAAVSRKKKRRMGTYSLVPKKKTKVLKQRTVIEMFK

SEQ ID NO: 33675 - protein, 41 aa, Artificial Sequence
  Quasi-synthetic sequence derived from human genome
RKFKFRKMHYDRFVIFLMPHIGCIVMALSKYLMMFQIYCKV

SEQ ID NO: 33676 - protein, 41 aa, Artificial Sequence
  Quasi-synthetic sequence derived from human genome
PVLFWVILVLVVVVGSSAFLLCHRRACRKRIRQKLHLCYPV

SEQ ID NO: 33677 - protein, 41 aa, Artificial Sequence
  Quasi-synthetic sequence derived from human genome
KGKRCIVLVTELMTSGTLKTYLKRFKVMKPKVLRSWCRQIL

SEQ ID NO: 33678 - protein, 41 aa, Artificial Sequence
  Quasi-synthetic sequence derived from human genome
EPPRPLAHLCRLRVRKAIGKYRIKLLDTLPLPGRLIRYLKY

SEQ ID NO: 33679 - protein, 41 aa, Artificial Sequence
  Quasi-synthetic sequence derived from human genome
KARRELKRLKEEARRKHAVAVIWAYWLGLKVRREYRKFFRA

SEQ ID NO: 33680 - protein, 41 aa, Artificial Sequence
  Quasi-synthetic sequence derived from human genome
KILLRLRLAILKYLFIDDKGILFVSSRKHLPTLPTLLSRLK

SEQ ID NO: 33681 - protein, 41 aa, Artificial Sequence
  Quasi-synthetic sequence derived from human genome
LVRHKDVRRIRSLQRSVQVLRAIVVMYVICWLPYHARRLMY

SEQ ID NO: 33682 - protein, 41 aa, Artificial Sequence
  Quasi-synthetic sequence derived from human genome
REGRLQQGNMRKNVRVLSRTSKFRRLRQLLRRRKKRWQGRR

SEQ ID NO: 33683 - protein, 41 aa, Artificial Sequence
  Quasi-synthetic sequence derived from human genome
MVCRPVFPCRRRFCPRPFLVGLVVAICLFYQTLTLRGSRKL

SEQ ID NO: 33684 - protein, 41 aa, Artificial Sequence
  Quasi-synthetic sequence derived from human genome
LQNFLKITSTRLLCSRLCQQLRSKRKFFGTVPISRLHRRVV

SEQ ID NO: 33685 - protein, 41 aa, Artificial Sequence
  Quasi-synthetic sequence derived from human genome
RLHKTGLRGRKGNLAICVIILLFILAVINLIITLVIWAVIR

SEQ ID NO: 33686 - protein, 41 aa, Artificial Sequence
  Quasi-synthetic sequence derived from human genome
LMLLSSIGRRKSLPSVTRPRLRVKMYNFLRSLPTLHERFRL

SEQ ID NO: 33687 - protein, 41 aa, Artificial Sequence
  Quasi-synthetic sequence derived from human genome
LKLLKSHRVLKWKADKSLSYNSRFWKNLLYLMPAKTVKPGR

SEQ ID NO: 33688 - protein, 41 aa, Artificial Sequence
  Quasi-synthetic sequence derived from human genome
YRTGKRLNIRKVIPYIASQFRKDKIWLRRTKPSKRQYQICL

SEQ ID NO: 33689 - protein, 41 aa, Artificial Sequence
  Quasi-synthetic sequence derived from human genome
TVGSVGKVGQVLRVMRLMRIFRILKLARHSTGLRAFGFTLR

SEQ ID NO: 33690 - protein, 41 aa, Artificial Sequence
  Quasi-synthetic sequence derived from human genome
LRILSKYHRFISFTLYLIGFCMFVLSLVKKHYRLQFYMFGW

SEQ ID NO: 33691 - protein, 41 aa, Artificial Sequence
  Quasi-synthetic sequence derived from human genome
IFVFFRKLTTIFPLNWKYRKALSLGCQRVTLHKNMFLTYIL

SEQ ID NO: 33692 - protein, 41 aa, Artificial Sequence
  Quasi-synthetic sequence derived from human genome
RKIMRKVTTLPNTLVENTALPRQRARKRTKVLSLAKRILRF

SEQ ID NO: 33693 - protein, 41 aa, Artificial Sequence
  Quasi-synthetic sequence derived from human genome
VKIFMLLVVGITSGMWIWTSKTLQSWQQVCSRRLKKKSRRK

SEQ ID NO: 33694 - protein, 41 aa, Artificial Sequence
  Quasi-synthetic sequence derived from human genome
LRRFQGLLLDRRGRLHGQVLRLREVARRLERLRRRSLVANV

SEQ ID NO: 33695 - protein, 41 aa, Artificial Sequence
  Quasi-synthetic sequence derived from human genome
LRQRSRRPKMRPARRRGGRRQLLLRALDAVATCWEKLFALR

SEQ ID NO: 33696 - protein, 41 aa, Artificial Sequence
  Quasi-synthetic sequence derived from human genome
RIVRALFEIALRKRWPTMTYRLLNLSKVIDKRLWGWASPLR

SEQ ID NO: 33697 - protein, 41 aa, Artificial Sequence
  Quasi-synthetic sequence derived from human genome
RFLNVRASAIIIQRKWRAILPAKIAHEHFLMIKRHRAACLI

SEQ ID NO: 33698 - protein, 41 aa, Artificial Sequence
  Quasi-synthetic sequence derived from human genome
DKLSRALRYYYNKRILHKTKGKRFTYKFNFSKVVLVNYPLL

SEQ ID NO: 33699 - protein, 41 aa, Artificial Sequence
  Quasi-synthetic sequence derived from human genome
LAILKAVKIIQGCFYTKLERTRFLNVRASAIIIQRKWRAIL

SEQ ID NO: 33700 - protein, 41 aa, Artificial Sequence
  Quasi-synthetic sequence derived from human genome
RKGIVRVVFFPFFFRWWLQVTSKVIFFWLLVLYLLQVAAIV

SEQ ID NO: 33701 - protein, 41 aa, Artificial Sequence
  Quasi-synthetic sequence derived from human genome
RLQRKAVISLQSYFRMRKARQYYLKMYKAIIVIQNYYHAYK

SEQ ID NO: 33702 - protein, 41 aa, Artificial Sequence
  Quasi-synthetic sequence derived from human genome
REHVHNASAHLTFNKFWRRYGKLSRHLMKVKLKKYTKFLFV

SEQ ID NO: 33703 - protein, 41 aa, Artificial Sequence
  Quasi-synthetic sequence derived from human genome
RNLVLKNRSLKLQKMKYRPPKTKFFFTVIPQPIFLSPGITL

SEQ ID NO: 33704 - protein, 41 aa, Artificial Sequence
  Quasi-synthetic sequence derived from human genome
VIKKIALREIRMLKQLKHPNLVNLLEVFRRKRRLHLVFEYC

SEQ ID NO: 33705 - protein, 41 aa, Artificial Sequence
  Quasi-synthetic sequence derived from human genome
LFRATRKPLSGRTPRLVYKWFLLIYKLSYAFGVVGYLAIMF

SEQ ID NO: 33706 - protein, 41 aa, Artificial Sequence
  Quasi-synthetic sequence derived from human genome
VRVLFYLGPVYLAGYLGLSITWLLLGALLWMWWRRNRRGKL

SEQ ID NO: 33707 - protein, 41 aa, Artificial Sequence
  Quasi-synthetic sequence derived from human genome
IQKHVRGWMARRHFQRLRDAAIVIQCAFRMLKARRELKALR

SEQ ID NO: 33708 - protein, 41 aa, Artificial Sequence
  Quasi-synthetic sequence derived from human genome
ALLRKRRYHAALAVLKGFRNGAVYGAKIRAPHALVMTFLFR

SEQ ID NO: 33709 - protein, 41 aa, Artificial Sequence
  Quasi-synthetic sequence derived from human genome
RKRKISVCQQTWALLCKNFLKKWRMKRESLMEWLNSLLLLL

SEQ ID NO: 33710 - protein, 41 aa, Artificial Sequence
  Quasi-synthetic sequence derived from human genome
ALIFSFLIVVLVLYVSWKCFPASLRQLRQCFVTQRRKQKQK

SEQ ID NO: 33711 - protein, 41 aa, Artificial Sequence
  Quasi-synthetic sequence derived from human genome
KPRVTNIFPKQKYLSKKTTKRKRGYIKNKLVFKKGKKISKK

SEQ ID NO: 33712 - protein, 41 aa, Artificial Sequence
  Quasi-synthetic sequence derived from human genome
IILLPVHLLITIYSALIFIPWYFLTNAKKKNAMAKRIKAKP

SEQ ID NO: 33713 - protein, 41 aa, Artificial Sequence
  Quasi-synthetic sequence derived from human genome
LHFFRGLLYWKNTLALAAILVLLRVRQCLSLRPAPAMRVAR

SEQ ID NO: 33714 - protein, 41 aa, Artificial Sequence
  Quasi-synthetic sequence derived from human genome
KVLFRKSEKYMKLFLWLLVGVGLLGLGLRHKAYERKLGKVA

SEQ ID NO: 33715 - protein, 41 aa, Artificial Sequence
  Quasi-synthetic sequence derived from human genome
GYLTWNYVLNEAIRLSLIMQLVALLLVVLWIRWKCRRLRIR

SEQ ID NO: 33716 - protein, 41 aa, Artificial Sequence
  Quasi-synthetic sequence derived from human genome
LKRFKVMKIKVLRSWCRQILKGLQFLHTRTPPIIHRDLKCD

SEQ ID NO: 33717 - protein, 41 aa, Artificial Sequence
  Quasi-synthetic sequence derived from human genome
VRSWSLALTWALNYRTGVRLRGAILTMAFKKILKLKNIKEK

SEQ ID NO: 33718 - protein, 41 aa, Artificial Sequence
  Quasi-synthetic sequence derived from human genome
RAAKWLHFPQLALRRRLGQLSCMSRPALKLRSWPLTVLYYL

SEQ ID NO: 33719 - protein, 41 aa, Artificial Sequence
  Quasi-synthetic sequence derived from human genome
IPRKRGKNPMKAVGLAWYSLYTRTWLGYLFYRQQLRRARNR

SEQ ID NO: 33720 - protein, 41 aa, Artificial Sequence
  Quasi-synthetic sequence derived from human genome
ARWIVGKVIGTKMQKTAKVRVTRLVLDPYLLKYFNKRKTYF

SEQ ID NO: 33721 - protein, 41 aa, Artificial Sequence
  Quasi-synthetic sequence derived from human genome
LIARYIKLRTGKTRTRKQVSSHIQVLARRKAREIQAKLKFW

SEQ ID NO: 33722 - protein, 41 aa, Artificial Sequence
  Quasi-synthetic sequence derived from human genome
GKLVSPKWKNFKGLKLQWRDKIRLNNAIWRAWYMQYLEKRK

SEQ ID NO: 33723 - protein, 41 aa, Artificial Sequence
  Quasi-synthetic sequence derived from human genome
GVVLLLLLLFYVVRYCWLRRQAALQRRLSAMEKGKLHKPGK

SEQ ID NO: 33724 - protein, 41 aa, Artificial Sequence
  Quasi-synthetic sequence derived from human genome
RMTLSRVLEKKRQAALIAYATRERAVIKLQSLVRMWRVRWR

SEQ ID NO: 33725 - protein, 41 aa, Artificial Sequence
  Quasi-synthetic sequence derived from human genome
LFLGRWLVVRLATKWCQRKLQAELKIGSFRFFWIQNVSLKF

SEQ ID NO: 33726 - protein, 41 aa, Artificial Sequence
  Quasi-synthetic sequence derived from human genome
LRKRRRLLSIIVVLVVTFALCWMPYHLVKTLYMLGSLLHWP

SEQ ID NO: 33727 - protein, 41 aa, Artificial Sequence
  Quasi-synthetic sequence derived from human genome
FFRLFRVMRLIKLLSRAEGVRTLLWTFIKSFQALPYVALLI

SEQ ID NO: 33728 - protein, 41 aa, Artificial Sequence
  Quasi-synthetic sequence derived from human genome
LYNFLKRQKAPRSKLISVLKILYQIVPSHKLMLEFHTLLRK

SEQ ID NO: 33729 - protein, 41 aa, Artificial Sequence
  Quasi-synthetic sequence derived from human genome
FPILINFKATKFLNLNLRYSFLKTASFFVRLGPMALAFKVR

SEQ ID NO: 33730 - protein, 41 aa, Artificial Sequence
  Quasi-synthetic sequence derived from human genome
LSRCFRSWRHLVKRQREPAAAAVALGRWQLLRKCLQALWLR

SEQ ID NO: 33731 - protein, 41 aa, Artificial Sequence
  Quasi-synthetic sequence derived from human genome
LINWFICSLCVPRVRKLWSSRRPRTRRNLLLGTACAIYLGF

SEQ ID NO: 33732 - protein, 41 aa, Artificial Sequence
  Quasi-synthetic sequence derived from human genome
RTLHNMMKKLFLQLIAEFKRLGSSVIYANFNRIILCTKKRR

SEQ ID NO: 33733 - protein, 41 aa, Artificial Sequence
  Quasi-synthetic sequence derived from human genome
LFYLGLTMVGKIKRLKKSAFVVLILLITAKLLVLPLLCREM

SEQ ID NO: 33734 - protein, 41 aa, Artificial Sequence
  Quasi-synthetic sequence derived from human genome
HIAKVKMKFRFLGKLMAKAIMDFRLVDLPLGLPFYKWMLRQ

SEQ ID NO: 33735 - protein, 41 aa, Artificial Sequence
  Quasi-synthetic sequence derived from human genome
CLPGFPVSWRTRMRAFHLSLPGGAQLLTYLVKVLKRRTWRR

SEQ ID NO: 33736 - protein, 41 aa, Artificial Sequence
  Quasi-synthetic sequence derived from human genome
IRKLIKDGLIIRKPVTVHSRARCRKNTLARRKGRHMGIGKR

SEQ ID NO: 33737 - protein, 41 aa, Artificial Sequence
  Quasi-synthetic sequence derived from human genome
KKQRLSKKLRRKLQMWLWSQTFCPVLYAWNDLGSRFWPRYV

SEQ ID NO: 33738 - protein, 41 aa, Artificial Sequence
  Quasi-synthetic sequence derived from human genome
RKAGWLFFKPLVTVQKERKLELVARRKWKQYWVTLKGCTLL

SEQ ID NO: 33739 - protein, 41 aa, Artificial Sequence
  Quasi-synthetic sequence derived from human genome
IKSSFLLKFIRKMTSRHWCAVPILFLSKALANVPRHKALGI

SEQ ID NO: 33740 - protein, 41 aa, Artificial Sequence
  Quasi-synthetic sequence derived from human genome
KALKAKKAVLKGVHSHKKKKIRTSPTFRRPKTLRLRRQPKY

SEQ ID NO: 33741 - protein, 41 aa, Artificial Sequence
  Quasi-synthetic sequence derived from human genome
RLRVKAVTKIREFILQKIYSFRKPMTNYQIPQTALLKYRFF

SEQ ID NO: 33742 - protein, 41 aa, Artificial Sequence
  Quasi-synthetic sequence derived from human genome
LRFPVFLAILINFFIFVRIVQLLVAKLRARQMHHTDYKFRL

SEQ ID NO: 33743 - protein, 41 aa, Artificial Sequence
  Quasi-synthetic sequence derived from human genome
MGFRTHHTGLLSVLAMFFLLVLILSSVFLFRLFKRRQGRIF

SEQ ID NO: 33744 - protein, 41 aa, Artificial Sequence
  Quasi-synthetic sequence derived from human genome
IFLMLINVDRYAAIVHPLRLRHLRRPRVARLLCLGVWALIL

SEQ ID NO: 33745 - protein, 41 aa, Artificial Sequence
  Quasi-synthetic sequence derived from human genome
ALTRSFYVILGFCGLTALYFLIRAFRLKKPQRRRYGLLANT

SEQ ID NO: 33746 - protein, 41 aa, Artificial Sequence
  Quasi-synthetic sequence derived from human genome
LNSKAKLHAALYERKLLSLEVRKRRRRSSRLRAMRPKYPVI

SEQ ID NO: 33747 - protein, 41 aa, Artificial Sequence
  Quasi-synthetic sequence derived from human genome
MRRILTRNEKNRPRRRFLCHLSRQQLRMAMRIPVLYEQLKR

SEQ ID NO: 33748 - protein, 41 aa, Artificial Sequence
  Quasi-synthetic sequence derived from human genome
KLFARKMKILGTIQILFGIMTFSFGVIFLFTLLKPYPRFPF

SEQ ID NO: 33749 - protein, 41 aa, Artificial Sequence
  Quasi-synthetic sequence derived from human genome
MTILASQKVKKIWQKQFRWPKNRLQILKFCKAREDLLKIQK

SEQ ID NO: 33750 - protein, 41 aa, Artificial Sequence
  Quasi-synthetic sequence derived from human genome
KKKMSKLSRSARAGVIFPVGRLMRYLKKGTFKYRISVGAPV

SEQ ID NO: 33751 - protein, 41 aa, Artificial Sequence
  Quasi-synthetic sequence derived from human genome
YKVPLIRKKSLRRTLSERGLLKDFLKKHNLNPARKYFPQWK

SEQ ID NO: 33752 - protein, 41 aa, Artificial Sequence
  Quasi-synthetic sequence derived from human genome
RKAIQRRKWAVRIIRKFIKGFISRNKPLCPDNEEFIVFVRK

SEQ ID NO: 33753 - protein, 41 aa, Artificial Sequence
  Quasi-synthetic sequence derived from human genome
IVALQLFYLSASINPILYNLISKKYRAAAFKLLLARKSRPR

SEQ ID NO: 33754 - protein, 41 aa, Artificial Sequence
  Quasi-synthetic sequence derived from human genome
KKKYMPYNHQHKYFFLIGPPALLPLYFQWYIFYFVIQRKKW

SEQ ID NO: 33755 - protein, 41 aa, Artificial Sequence
  Quasi-synthetic sequence derived from human genome
KWRVKKVVLVLLLVTSVFLFLNIALINIHINASINGYRRNK

SEQ ID NO: 33756 - protein, 41 aa, Artificial Sequence
  Quasi-synthetic sequence derived from human genome
KEFKRAFVRILGCQCRGRGRRRRRRRRRLGGCAYTYRPWTR

SEQ ID NO: 33757 - protein, 41 aa, Artificial Sequence
  Quasi-synthetic sequence derived from human genome
YWLKLVKGILPLVGMAMVPALLGLIGYHLYRKANRPKVSKK

SEQ ID NO: 33758 - protein, 41 aa, Artificial Sequence
  Quasi-synthetic sequence derived from human genome
CLIQAYWKGFQTRKRLKKLPSAVIALQRSFRSKRSKMLLEI

SEQ ID NO: 33759 - protein, 41 aa, Artificial Sequence
  Quasi-synthetic sequence derived from human genome
RGYLARQHFKKRKIQDLAIRCVQKNIKKNKGVKDWPWWKLF

SEQ ID NO: 33760 - protein, 41 aa, Artificial Sequence
  Quasi-synthetic sequence derived from human genome
YLLGRKRRWSKCKIRVFVGGQINRMDQERKAIISLLSKFRL

SEQ ID NO: 33761 - protein, 41 aa, Artificial Sequence
  Quasi-synthetic sequence derived from human genome
KKLSKKRAATTVLQELKKLPPLPVVEKPKLFFKKRPKTIVK

SEQ ID NO: 33762 - protein, 41 aa, Artificial Sequence
  Quasi-synthetic sequence derived from human genome
LFLKLFICFIFIRSSPTIVSNKRVSKRKFIPPAFTNVSTKF

SEQ ID NO: 33763 - protein, 41 aa, Artificial Sequence
  Quasi-synthetic sequence derived from human genome
RRRIKSLLPKLSCGVKNRMHIRRKRIVGGKRAQLGDLPWQV

SEQ ID NO: 33764 - protein, 41 aa, Artificial Sequence
  Quasi-synthetic sequence derived from human genome
LFCLQYLGVRVLLRFQRKLSVLLLLLGRRRVDFRLVNELLV

SEQ ID NO: 33765 - protein, 41 aa, Artificial Sequence
  Quasi-synthetic sequence derived from human genome
KFFLYVCMYVCIREKILLYKTHWMTPIFLKVVINTRRIKHH

SEQ ID NO: 33766 - protein, 41 aa, Artificial Sequence
  Quasi-synthetic sequence derived from human genome
MGKKINKLFCFNFLVQCFRGKSKPSKCQIRKKVKNHIERLL

SEQ ID NO: 33767 - protein, 41 aa, Artificial Sequence
  Quasi-synthetic sequence derived from human genome
KNRYDKDKPVSFHKKKIFWSHRNSFPHLLYRLLFPRLMLLL

SEQ ID NO: 33768 - protein, 41 aa, Artificial Sequence
  Quasi-synthetic sequence derived from human genome
KKCILRWLARQKTCPCCRKEVKRKKVVHMNKLRKTIGRLEV

SEQ ID NO: 33769 - protein, 41 aa, Artificial Sequence
  Quasi-synthetic sequence derived from human genome
KYIQNLQGLFALPFGRTAKPAHIAKVKMKFRFLGKLMAKAI

SEQ ID NO: 33770 - protein, 41 aa, Artificial Sequence
  Quasi-synthetic sequence derived from human genome
WAVIKPGTSFGISVLRALRLLRIFKVTKYWASLRNLVVSLL

SEQ ID NO: 33771 - protein, 41 aa, Artificial Sequence
  Quasi-synthetic sequence derived from human genome
FLIVIVCYTLITKELYRSYVRTRGVGKVPRKKVNVKVFIII

SEQ ID NO: 33772 - protein, 41 aa, Artificial Sequence
  Quasi-synthetic sequence derived from human genome
NFVYKLFSLQDLLLLVRCSVQRIETRPRSKKRKKIRRQFPV

SEQ ID NO: 33773 - protein, 41 aa, Artificial Sequence
  Quasi-synthetic sequence derived from human genome
RKVHLFTIIQMSCLGLLWIIKVSRAAIVFPMMVLALVFVRK

SEQ ID NO: 33774 - protein, 41 aa, Artificial Sequence
  Quasi-synthetic sequence derived from human genome
RRTLRKPKRVPSIYKLKLRPRIRPRRDHRPEKQPSRIPRPL

SEQ ID NO: 33775 - protein, 41 aa, Artificial Sequence
  Quasi-synthetic sequence derived from human genome
IVHARKKYRFHKTRSHVTHRTTKVKKSPKVRKKSYLSRLML

SEQ ID NO: 33776 - protein, 41 aa, Artificial Sequence
  Quasi-synthetic sequence derived from human genome
QYVYKIGIYGWRKRCLYLFVLLLLIILVVNLALTIWILKVM

SEQ ID NO: 33777 - protein, 41 aa, Artificial Sequence
  Quasi-synthetic sequence derived from human genome
RGKFVSLFYTVVTPALNPLIYTLRNKKVKGAARRLLRSLGR

SEQ ID NO: 33778 - protein, 41 aa, Artificial Sequence
  Quasi-synthetic sequence derived from human genome
RSVPRTLLCLCRVAVRRALGKHRLHLIPSLPLPDPIKKFLL

SEQ ID NO: 33779 - protein, 41 aa, Artificial Sequence
  Quasi-synthetic sequence derived from human genome
RLRNAKIYVERAVKQKKIFTIQGCYPVIRCLLRRRGWVEKK

SEQ ID NO: 33780 - protein, 41 aa, Artificial Sequence
  Quasi-synthetic sequence derived from human genome
RKRISAARERKATKILGIILGAFIICWLPFFVVSLVLPICR

SEQ ID NO: 33781 - protein, 41 aa, Artificial Sequence
  Quasi-synthetic sequence derived from human genome
FRWMRLRIRRMADAWIQAIKSLAEKQNLEKRKRKKVLVHLG

SEQ ID NO: 33782 - protein, 41 aa, Artificial Sequence
  Quasi-synthetic sequence derived from human genome
RFVAPLYYINKECFKSALYKQTVNPILIKVAWKKAAKRKIK

SEQ ID NO: 33783 - protein, 41 aa, Artificial Sequence
  Quasi-synthetic sequence derived from human genome
PWTSLTRKGIVRVVFFPFFFRWWLQVTSKVIFFWLLVLYLL

SEQ ID NO: 33784 - protein, 41 aa, Artificial Sequence
  Quasi-synthetic sequence derived from human genome
LWGVRKCKPQMNYDKLSRALRYYYNKRILHKTKGKRFTYKF

SEQ ID NO: 33785 - protein, 41 aa, Artificial Sequence
  Quasi-synthetic sequence derived from human genome
MFCKAIRFSYPSIHPFILIWGNKKLKQTFLSVFWQMRYWVK

SEQ ID NO: 33786 - protein, 41 aa, Artificial Sequence
  Quasi-synthetic sequence derived from human genome
LRPLDTVQRPKGYRKLLALGTWLLALLLTLPVMLAMRLVRR

SEQ ID NO: 33787 - protein, 41 aa, Artificial Sequence
  Quasi-synthetic sequence derived from human genome
VLRPFLGSSWVVYGTNYRKAIFIFIRWLLKLGHHGRAPPRR

SEQ ID NO: 33788 - protein, 41 aa, Artificial Sequence
  Quasi-synthetic sequence derived from human genome
VRSMVMRYGSRLWKLRVLQAELKINIRLTPTGKAIPIRLFL

SEQ ID NO: 33789 - protein, 41 aa, Artificial Sequence
  Quasi-synthetic sequence derived from human genome
RAASVIQKAVRHFLLRKKQEKFTSGIIKIQALWRGYSWRKK

SEQ ID NO: 33790 - protein, 41 aa, Artificial Sequence
  Quasi-synthetic sequence derived from human genome
RARRKKSSARKFGLQKLWEWCLGLVQMSSLPWRVVIGRLGR

SEQ ID NO: 33791 - protein, 41 aa, Artificial Sequence
  Quasi-synthetic sequence derived from human genome
ALRRAVKRHRERRERQKRVFRMSLLIISTFLLCWTPISVLN

SEQ ID NO: 33792 - protein, 41 aa, Artificial Sequence
  Quasi-synthetic sequence derived from human genome
VILYYIVSKQFQARVISVMLYRNYLRSMRRKSFRSGSLRSL

SEQ ID NO: 33793 - protein, 41 aa, Artificial Sequence
  Quasi-synthetic sequence derived from human genome
MRKHLSWWWLATVCMLLFSHLSAVQTRGIKHRIKWNRKALP

SEQ ID NO: 33794 - protein, 41 aa, Artificial Sequence
  Quasi-synthetic sequence derived from human genome
RRKKRLRHRVPPRKPEPLVKLHRTALHWACLKGHSQLVNKL

SEQ ID NO: 33795 - protein, 41 aa, Artificial Sequence
  Quasi-synthetic sequence derived from human genome
FPFFGETLQMVLQRRKFLQMKRRKYGFIYKTHLFGRPTVRV

SEQ ID NO: 33796 - protein, 41 aa, Artificial Sequence
  Quasi-synthetic sequence derived from human genome
VLKPHFHKDWQRRVATWFNQPARKIRRRKARQAKARRIAPR

SEQ ID NO: 33797 - protein, 41 aa, Artificial Sequence
  Quasi-synthetic sequence derived from human genome
LKMVWRINPAHRKLQARLDQMRKFRRQHEQLRAVIVRVLRP

SEQ ID NO: 33798 - protein, 41 aa, Artificial Sequence
  Quasi-synthetic sequence derived from human genome
HILEHRVRVLSVARPGLWLYTHPLIKLLFLPRRSRCKFFSL

SEQ ID NO: 33799 - protein, 41 aa, Artificial Sequence
  Quasi-synthetic sequence derived from human genome
LRARVSYRLLGVISLLHLVLSMGLQLYGFRQRQRARKEWRL

SEQ ID NO: 33800 - protein, 41 aa, Artificial Sequence
  Quasi-synthetic sequence derived from human genome
LRVLRALRILYVMRLARHSLGLQTLGLTVRRCTREFGLLLL

SEQ ID NO: 33801 - protein, 41 aa, Artificial Sequence
  Quasi-synthetic sequence derived from human genome
LTPIKYLRKSLKIIYLNSIQELEIRNMSWPRLIRKLRCYLK

SEQ ID NO: 33802 - protein, 41 aa, Artificial Sequence
  Quasi-synthetic sequence derived from human genome
LRRRKAHFQYLLNHRLQILSPVLPVSCRDPRHLRRLRDKLL

SEQ ID NO: 33803 - protein, 41 aa, Artificial Sequence
  Quasi-synthetic sequence derived from human genome
PLRRGRPKRRRKPQPHSGSVLALPLRSRKIRKQLRSVVSRM

SEQ ID NO: 33804 - protein, 41 aa, Artificial Sequence
  Quasi-synthetic sequence derived from human genome
FFRLFRVMRLVKLLSRGEGIRTLLWTFIKSFQALPYVALLI

SEQ ID NO: 33805 - protein, 41 aa, Artificial Sequence
  Quasi-synthetic sequence derived from human genome
HLLPALGFKNKTVLKKRCKDCYLVKRRGRWYVYCKTHPRHK

SEQ ID NO: 33806 - protein, 41 aa, Artificial Sequence
  Quasi-synthetic sequence derived from human genome
VYKVGIYGWRKRCLYFFVLLLMILILVNLAMTIWILKVMNF

SEQ ID NO: 33807 - protein, 41 aa, Artificial Sequence
  Quasi-synthetic sequence derived from human genome
LRPPSQIPKRKRKAKKRRKNDVVVVKGKLKLCSISGLIALC

SEQ ID NO: 33808 - protein, 41 aa, Artificial Sequence
  Quasi-synthetic sequence derived from human genome
VDKIRRKNCPACRLRKCCQAGMVLGGRKFKKFNKVRVVRAL

SEQ ID NO: 33809 - protein, 41 aa, Artificial Sequence
  Quasi-synthetic sequence derived from human genome
LLIYLRVATWNQILDPWVYILFRRAVLRRLQPRLSTRPRSL

SEQ ID NO: 33810 - protein, 41 aa, Artificial Sequence
  Quasi-synthetic sequence derived from human genome
PRKKRRRSRLVLYPETSRKYRPRVEHRSRAQRCLLLLVAIV

SEQ ID NO: 33811 - protein, 41 aa, Artificial Sequence
  Quasi-synthetic sequence derived from human genome
IHLFRKPQRSFFGKLLREFRLVAADRRSWKILLFGVINLIC

SEQ ID NO: 33812 - protein, 41 aa, Artificial Sequence
  Quasi-synthetic sequence derived from human genome
ASCTRCLNKIMKTRVCRRLRRANRVLRARCRRAVKSNACYW

SEQ ID NO: 33813 - protein, 41 aa, Artificial Sequence
  Quasi-synthetic sequence derived from human genome
IKNITCSMKITWYILVLLVFIFLIILTIRKILEGQRRVQKW

SEQ ID NO: 33814 - protein, 41 aa, Artificial Sequence
  Quasi-synthetic sequence derived from human genome
VVLLLLLLLLLFLILRHRRQGKHWTSSPAQLPTPRKKTSML

SEQ ID NO: 33815 - protein, 41 aa, Artificial Sequence
  Quasi-synthetic sequence derived from human genome
WKKIIAYQQKLLNYFARNFYNMRMLALFVAFAINFILLFYK

SEQ ID NO: 33816 - protein, 41 aa, Artificial Sequence
  Quasi-synthetic sequence derived from human genome
RVAKMGLILAIRSILLVIPFPFTLRRLKYCQKNLLSHSYCL

SEQ ID NO: 33817 - protein, 41 aa, Artificial Sequence
  Quasi-synthetic sequence derived from human genome
SMRKLVIVRAGCPIRLFAIVRGRPAPKVTWRKVGIDNVVRK

SEQ ID NO: 33818 - protein, 41 aa, Artificial Sequence
  Quasi-synthetic sequence derived from human genome
ILATLGVALLFIVRKKRKEKRLKRLRDAKSLAEMLISKNNR

SEQ ID NO: 33819 - protein, 41 aa, Artificial Sequence
  Quasi-synthetic sequence derived from human genome
GQERARPGAWRRDIFGRIIWHKFKQWVIPWHLNKRYNRKRF

SEQ ID NO: 33820 - protein, 41 aa, Artificial Sequence
  Quasi-synthetic sequence derived from human genome
MKKQRKILWRKGIHLAFSEKWNTGFGGFKKFYFHQHLCILK

SEQ ID NO: 33821 - protein, 41 aa, Artificial Sequence
  Quasi-synthetic sequence derived from human genome
WLQWLPQPQPRVRPRKRRRPRPRRAPVLSTHHAARVSLHRW

SEQ ID NO: 33822 - protein, 41 aa, Artificial Sequence
  Quasi-synthetic sequence derived from human genome
FLLPVLAIGLCYLLIVGKMRAVALRAGWQQRRRSEKKITRL

SEQ ID NO: 33823 - protein, 41 aa, Artificial Sequence
  Quasi-synthetic sequence derived from human genome
RKRFFALPYVDHFLRLEREKRARIKARKENLERKKAKILLK

SEQ ID NO: 33824 - protein, 41 aa, Artificial Sequence
  Quasi-synthetic sequence derived from human genome
ILIMRLKMFLTPHMCVMASLICSRQLFGWLFRRVRFEKVIF

SEQ ID NO: 33825 - protein, 41 aa, Artificial Sequence
  Quasi-synthetic sequence derived from human genome
FIIIKVKSSGIRVGSSKRKKSEKKVTRMVSIVVAVFIFCWL

SEQ ID NO: 33826 - protein, 41 aa, Artificial Sequence
  Quasi-synthetic sequence derived from human genome
RGINGVSPKVRKVLQLLRLRQIFNGTFVKLNKASINMLRIV

SEQ ID NO: 33827 - protein, 41 aa, Artificial Sequence
  Quasi-synthetic sequence derived from human genome
KIMVRRCLVTLRPFRLFVLGIGFFTLCFLMTSLGGQFSARR

SEQ ID NO: 33828 - protein, 41 aa, Artificial Sequence
  Quasi-synthetic sequence derived from human genome
FVIYSSVVSFYLPFGVTVLVYARIYVVLKQRRRKRILTRQN

SEQ ID NO: 33829 - protein, 41 aa, Artificial Sequence
  Quasi-synthetic sequence derived from human genome
LQPPGMLWLMERGGLGKPRGPRHRGLLRVRLGRFISRLLLW

SEQ ID NO: 33830 - protein, 41 aa, Artificial Sequence
  Quasi-synthetic sequence derived from human genome
RKRYRRKLKKYGKNVGKVIIKGCRYVVIGLQGFAAAYSAPF

SEQ ID NO: 33831 - protein, 41 aa, Artificial Sequence
  Quasi-synthetic sequence derived from human genome
RSLKLQKMKYRPPKTKFFFTVIPQPIFLSPGITLTLPIVFR

SEQ ID NO: 33832 - protein, 41 aa, Artificial Sequence
  Quasi-synthetic sequence derived from human genome
ILYTLTTNFFKDKLKQLLHKHQRKSIFKIKKKSLSTSIVWI

SEQ ID NO: 33833 - protein, 41 aa, Artificial Sequence
  Quasi-synthetic sequence derived from human genome
ILKKGKRENIVNIRKQREKAAILIQAVWKGFILRKKLTTAL

SEQ ID NO: 33834 - protein, 41 aa, Artificial Sequence
  Quasi-synthetic sequence derived from human genome
RGQKKKKVVKYGMGGMIIVLLICIVWFPLLFMSLIKSVAGV

SEQ ID NO: 33835 - protein, 41 aa, Artificial Sequence
  Quasi-synthetic sequence derived from human genome
LRTLRAVRVLRPLKLVSGIPSLQIVLKSIMKAMVPLLQIGL

SEQ ID NO: 33836 - protein, 41 aa, Artificial Sequence
  Quasi-synthetic sequence derived from human genome
LFPEFRPGKVLRFLHLFGPGKNVPSVWRSARRKRKKHRELI

SEQ ID NO: 33837 - protein, 41 aa, Artificial Sequence
  Quasi-synthetic sequence derived from human genome
FYLLKIANFSNLLFLHLKRRVRSVILVILLGTLIFLVCHLL

SEQ ID NO: 33838 - protein, 41 aa, Artificial Sequence
  Quasi-synthetic sequence derived from human genome
FLLLILLCMSLLLFQVIRLYQRRRWMIRALHLFPAPPAHWF

SEQ ID NO: 33839 - protein, 41 aa, Artificial Sequence
  Quasi-synthetic sequence derived from human genome
LRLQIIQRERRRKELFRKKNKAAAVIQRAWRSYQLRKHLSH

SEQ ID NO: 33840 - protein, 41 aa, Artificial Sequence
  Quasi-synthetic sequence derived from human genome
RRFRRWLNRYSYTVLSSWPERALISLKNRSRFLVRPNTRNR

SEQ ID NO: 33841 - protein, 41 aa, Artificial Sequence
  Quasi-synthetic sequence derived from human genome
RTLMKMPNIKISRPLKVLLTVVIVFIVTQLPYNIVKFCRAI

SEQ ID NO: 33842 - protein, 41 aa, Artificial Sequence
  Quasi-synthetic sequence derived from human genome
YRKQIFILLFQRLQNSKTTKFIKSFLVFINLYCIKYGALAL

SEQ ID NO: 33843 - protein, 41 aa, Artificial Sequence
  Quasi-synthetic sequence derived from human genome
LKPLISMKFLRPLRVLSQFERMKVVVRALIKTTLPTLNVFL

SEQ ID NO: 33844 - protein, 41 aa, Artificial Sequence
  Quasi-synthetic sequence derived from human genome
RLVALKKFVAVLAKYFPGRPLVQNFLHSVNEWLKRQKRNKI

SEQ ID NO: 33845 - protein, 41 aa, Artificial Sequence
  Quasi-synthetic sequence derived from human genome
RRRKELFRKKNKAAAVIQRAWRSYQLRKHLSHLRHMKQLGA

SEQ ID NO: 33846 - protein, 41 aa, Artificial Sequence
  Quasi-synthetic sequence derived from human genome
MILCYIWLLVLLLHKHRSILLRRLCSLMGTVFLLRCFTMFV

SEQ ID NO: 33847 - protein, 41 aa, Artificial Sequence
  Quasi-synthetic sequence derived from human genome
PKPRMRGLLARRLRNHMAVAFVLSLGVAALYKFRVADQRKK

SEQ ID NO: 33848 - protein, 41 aa, Artificial Sequence
  Quasi-synthetic sequence derived from human genome
KRPKNFGIGQDIQPKRDLTRFVKWPRYIRLQRQRAILYKRL

SEQ ID NO: 33849 - protein, 41 aa, Artificial Sequence
  Quasi-synthetic sequence derived from human genome
WKFFIDRIRRQLKVTLCFSPVGNKLRVRSRKFPAIVNCTAI

SEQ ID NO: 33850 - protein, 41 aa, Artificial Sequence
  Quasi-synthetic sequence derived from human genome
FFNISGILLWYPVPCTRLPIRMAKALGKRTAKYRWFAVLYL

SEQ ID NO: 33851 - protein, 41 aa, Artificial Sequence
  Quasi-synthetic sequence derived from human genome
RRKRKRSKRKKEVPFFGRRMHHTCPCLPGLACLRTSFNRFI

SEQ ID NO: 33852 - protein, 41 aa, Artificial Sequence
  Quasi-synthetic sequence derived from human genome
RALRGLSYRSLRRRVRRLRRLTAREAATAVAALLWAAVTRA

SEQ ID NO: 33853 - protein, 41 aa, Artificial Sequence
  Quasi-synthetic sequence derived from human genome
RLKVFDGIPPPYDKKKRMVVPAALKVVRLKPTRKFAYLGRL

SEQ ID NO: 33854 - protein, 41 aa, Artificial Sequence
  Quasi-synthetic sequence derived from human genome
VWKNWLGVKRQPLWTLVLILWPVIIFIILAITRTKFPPTAK

SEQ ID NO: 33855 - protein, 41 aa, Artificial Sequence
  Quasi-synthetic sequence derived from human genome
VLYLLRGRKTFLIPVLFNNYITAALKLLEKLYKVNLKVKHV

SEQ ID NO: 33856 - protein, 41 aa, Artificial Sequence
  Quasi-synthetic sequence derived from human genome
WLRRRRARGIPPGPTPWPLVGNFGHVLLPPFLRRRSWLSSR

SEQ ID NO: 33857 - protein, 41 aa, Artificial Sequence
  Quasi-synthetic sequence derived from human genome
LKWLDMFSNWDKWLSRRFQKVKLRCRKGIPSSLRAKAWQYL

SEQ ID NO: 33858 - protein, 41 aa, Artificial Sequence
  Quasi-synthetic sequence derived from human genome
VRALHRLHQFQQLLWVLGLLVGLLLLLLGLGACYTWRRRRV

SEQ ID NO: 33859 - protein, 41 aa, Artificial Sequence
  Quasi-synthetic sequence derived from human genome
AALRAARLRHQELFRLRGIKAQVALRLAELARRQRRRQARR

SEQ ID NO: 33860 - protein, 41 aa, Artificial Sequence
  Quasi-synthetic sequence derived from human genome
RIRVIKKKKVIMKKRKKLTLTRPTPLVTAGPLVTPTPAGTL

SEQ ID NO: 33861 - protein, 41 aa, Artificial Sequence
  Quasi-synthetic sequence derived from human genome
MQSWRRRKSLWLALSASWLLLVLLGGFSLLRLALPPRPRPG

SEQ ID NO: 33862 - protein, 41 aa, Artificial Sequence
  Quasi-synthetic sequence derived from human genome
FLLLLLLGTIATIVFFCCWHRKLQKGRHPMKSVFSGRSRSR

SEQ ID NO: 33863 - protein, 41 aa, Artificial Sequence
  Quasi-synthetic sequence derived from human genome
VRHKFNRLPRVLILHLKRYSFNVALSLNNKIGQQVIIPRYL

SEQ ID NO: 33864 - protein, 41 aa, Artificial Sequence
  Quasi-synthetic sequence derived from human genome
YLRIWILVLQVRQRVKPDRKPKLKPQDFRNFVTMFVVFVLF

SEQ ID NO: 33865 - protein, 41 aa, Artificial Sequence
  Quasi-synthetic sequence derived from human genome
AKRLAIMMMKKREKYLYQKIMFGKRRKIREANKLAEKRKAH

SEQ ID NO: 33866 - protein, 41 aa, Artificial Sequence
  Quasi-synthetic sequence derived from human genome
VGWFVRKLSGLLILLVLFAIGYFLQRIICPSPRRYPRGQAR

SEQ ID NO: 33867 - protein, 41 aa, Artificial Sequence
  Quasi-synthetic sequence derived from human genome
YALCNKAFRDTFRLLLLCRWDKRRWRKIPKRPGSVHRTPSR

SEQ ID NO: 33868 - protein, 41 aa, Artificial Sequence
  Quasi-synthetic sequence derived from human genome
KFMVLLWKNFILKRRRCIALVVEMVLTFLFSAALLATRSVI

SEQ ID NO: 33869 - protein, 41 aa, Artificial Sequence
  Quasi-synthetic sequence derived from human genome
FKNLFYRTYMLFKNASGKRRFLLCLLLFTVITYFFVVIGIA

SEQ ID NO: 33870 - protein, 41 aa, Artificial Sequence
  Quasi-synthetic sequence derived from human genome
KFLRFRRSLLLLVKHSCVESLFLVRNFCILYYFLGYIPKAW

SEQ ID NO: 33871 - protein, 41 aa, Artificial Sequence
  Quasi-synthetic sequence derived from human genome
WLLFLAHRVALAALPCRRGSRGFGMFYAVRRGRKTGVFLTW

SEQ ID NO: 33872 - protein, 41 aa, Artificial Sequence
  Quasi-synthetic sequence derived from human genome
VCRPKKKGRKLLHEKAAQIKRRYAKPIGRPKNKLKQRLLSV

SEQ ID NO: 33873 - protein, 41 aa, Artificial Sequence
  Quasi-synthetic sequence derived from human genome
PSVRQRCLIQQKRRRHRATRKIGIAIATFLICFAPYVMTRL

SEQ ID NO: 33874 - protein, 41 aa, Artificial Sequence
  Quasi-synthetic sequence derived from human genome
LLQSLSRLQKPRAFILKSKGIKQKQIIPKNLLDSKSLKLII

SEQ ID NO: 33875 - protein, 41 aa, Artificial Sequence
  Quasi-synthetic sequence derived from human genome
GQTKSKIKSKYASYLSFIKILLKRGGVKVSTKNLIKLFQII

SEQ ID NO: 33876 - protein, 41 aa, Artificial Sequence
  Quasi-synthetic sequence derived from human genome
LRRNLHFPLFPHTRTTVKKLAVSPKWKNYGLRIFGFIHPAR

SEQ ID NO: 33877 - protein, 41 aa, Artificial Sequence
  Quasi-synthetic sequence derived from human genome
LARSLLVLRLCAWPALLARHEQLLYVSRKLLGQRLFNKLMK

SEQ ID NO: 33878 - protein, 41 aa, Artificial Sequence
  Quasi-synthetic sequence derived from human genome
RHAMMMKSWKIAIESLGFKRFKYSKFSHMHLMAFRKISLKT

SEQ ID NO: 33879 - protein, 41 aa, Artificial Sequence
  Quasi-synthetic sequence derived from human genome
SFGRRVLCYPLYRHFKLVMKAYRDTIKILQLGKSAVLKCLL

SEQ ID NO: 33880 - protein, 41 aa, Artificial Sequence
  Quasi-synthetic sequence derived from human genome
LLLLLLGLLRPLRRRSCLLAPGKGPPALGASRGPRRSWAVW

SEQ ID NO: 33881 - protein, 41 aa, Artificial Sequence
  Quasi-synthetic sequence derived from human genome
FWRRLLGLLPGRPGLAALLGRLSDRLGRNRDRQRRRSPWLL

SEQ ID NO: 33882 - protein, 41 aa, Artificial Sequence
  Quasi-synthetic sequence derived from human genome
FLKMSVSVNFFRPFTRFLVPFTLHRKRNNLTILQRYMSSKI

SEQ ID NO: 33883 - protein, 41 aa, Artificial Sequence
  Quasi-synthetic sequence derived from human genome
LWRKLSFRHWPTLFSYYNITLAKRYISLLPVIPVTLRLNPR

SEQ ID NO: 33884 - protein, 41 aa, Artificial Sequence
  Quasi-synthetic sequence derived from human genome
CIMYKVPLIRKKSLRRTLSERGLLKDFLKKHNLNPARKYFP

SEQ ID NO: 33885 - protein, 41 aa, Artificial Sequence
  Quasi-synthetic sequence derived from human genome
KIAARMLWRILNGHSLTRRERRQFLRICADLFRLVPFLVFV

SEQ ID NO: 33886 - protein, 41 aa, Artificial Sequence
  Quasi-synthetic sequence derived from human genome
RNFVKHRPTKLKSLLRLVKHWYQQYVKARSPRANLPPLYAL

SEQ ID NO: 33887 - protein, 41 aa, Artificial Sequence
  Quasi-synthetic sequence derived from human genome
LVAHTRGVPPLLKSFLQERLGIHLIRRKIVKPKHHVLMSRK

SEQ ID NO: 33888 - protein, 41 aa, Artificial Sequence
  Quasi-synthetic sequence derived from human genome
AARGRRAWLSVLLGLVLGFVLASRLVLPRASELKRAGPRRR

SEQ ID NO: 33889 - protein, 41 aa, Artificial Sequence
  Quasi-synthetic sequence derived from human genome
RRSCWRKWKQLSRLQRNMILFLLAFLLFCGLLFYINLADHW

SEQ ID NO: 33890 - protein, 41 aa, Artificial Sequence
  Quasi-synthetic sequence derived from human genome
KWMLTRKQFGLLSLFFAVLHAIYTLSYAMRRSYRYKLLNWA

SEQ ID NO: 33891 - protein, 41 aa, Artificial Sequence
  Quasi-synthetic sequence derived from human genome
RRAIKWSRLLQGGGVPRSRTVKRYVRKGVPLEHRARVWMVL

SEQ ID NO: 33892 - protein, 41 aa, Artificial Sequence
  Quasi-synthetic sequence derived from human genome
WFVLKVVLIIIRLKKYEKRGELVTVLDKFLSHAKRQPRKPF

SEQ ID NO: 33893 - protein, 41 aa, Artificial Sequence
  Quasi-synthetic sequence derived from human genome
RLVRMKVFHLSLSQSVVLRHHWILPFVQALKARMTSFHRFF

SEQ ID NO: 33894 - protein, 41 aa, Artificial Sequence
  Quasi-synthetic sequence derived from human genome
FLIMVVVYLRIYVYVKRKTNVLSPHTSGSISRRRTPMKLMK

SEQ ID NO: 33895 - protein, 41 aa, Artificial Sequence
  Quasi-synthetic sequence derived from human genome
PLRLVWKEVILRKILILVLVQKDVSLTTQYFLQKARSRRHR

SEQ ID NO: 33896 - protein, 41 aa, Artificial Sequence
  Quasi-synthetic sequence derived from human genome
KRARLVRVHAYIISYLKKEMPSVFGKENKKKQLILKLPVIF

SEQ ID NO: 33897 - protein, 41 aa, Artificial Sequence
  Quasi-synthetic sequence derived from human genome
VSKFLLAFLVPLAIIASSHAAVSLRLQHRGRRRPGRFVRLV

SEQ ID NO: 33898 - protein, 41 aa, Artificial Sequence
  Quasi-synthetic sequence derived from human genome
LIIAKMRMVALKAGWQQRKRSERKITLMVMMVVMVFVICWM

SEQ ID NO: 33899 - protein, 41 aa, Artificial Sequence
  Quasi-synthetic sequence derived from human genome
FGKLIRSVFMGLRTRRLGTRGNSKYHYYGLRIKASSPLLRL

SEQ ID NO: 33900 - protein, 41 aa, Artificial Sequence
  Quasi-synthetic sequence derived from human genome
LRNIRYGFNTILVILIWRIFIARSQMARNIWYFVVSLCYKF

SEQ ID NO: 33901 - protein, 41 aa, Artificial Sequence
  Quasi-synthetic sequence derived from human genome
LLKVKFDQKKRVKLAQGLWLMNWFSVLAGIIIFSLGLFLKI

SEQ ID NO: 33902 - protein, 41 aa, Artificial Sequence
  Quasi-synthetic sequence derived from human genome
RCLRPLRIFKLVPQMRKVVRELFSGFKEIFLVSILLLTLML

SEQ ID NO: 33903 - protein, 41 aa, Artificial Sequence
  Quasi-synthetic sequence derived from human genome
LCARVRKLRSAGRCGKFHQVRRVMTILFLTMVISYFGCMKA

SEQ ID NO: 33904 - protein, 41 aa, Artificial Sequence
  Quasi-synthetic sequence derived from human genome
LLLPVYALGYLGLSFSWVLLALALLAWCRRSRGLKALRLCR

SEQ ID NO: 33905 - protein, 41 aa, Artificial Sequence
  Quasi-synthetic sequence derived from human genome
LTKLCRKKPKARQFFLFNDILVYGNIVIQKKKYNKQHIIPL

SEQ ID NO: 33906 - protein, 41 aa, Artificial Sequence
  Quasi-synthetic sequence derived from human genome
RKRSRRVLYPRVVRRQLPVEEPNPAKRLLFLLLTIVFCQIL

SEQ ID NO: 33907 - protein, 41 aa, Artificial Sequence
  Quasi-synthetic sequence derived from human genome
RRPLKNRTDFLVPLLSSVLTVAWICCLVTAFYWCLRKRRKP

SEQ ID NO: 33908 - protein, 41 aa, Artificial Sequence
  Quasi-synthetic sequence derived from human genome
RRKSLRGRERVLSILRGVPHGKGRAIRLGVLKSPLKKLMST

SEQ ID NO: 33909 - protein, 41 aa, Artificial Sequence
  Quasi-synthetic sequence derived from human genome
YINKKTFIVLNKGKAIFRFSATSALYILTPFNPLRKIAIKI

SEQ ID NO: 33910 - protein, 41 aa, Artificial Sequence
  Quasi-synthetic sequence derived from human genome
RLFSKVLVTIKKVYMKERSFKGVEFGKNLGLKSSLIRKPRI

SEQ ID NO: 33911 - protein, 41 aa, Artificial Sequence
  Quasi-synthetic sequence derived from human genome
LKRNMMPWALQKKREIHMAKAHRRRAARSALPMRLTSCIFR

SEQ ID NO: 33912 - protein, 41 aa, Artificial Sequence
  Quasi-synthetic sequence derived from human genome
RTPMSWSRIKKILKEGPMLKNCNSFKRWKLRYFLVQGQKLY

SEQ ID NO: 33913 - protein, 41 aa, Artificial Sequence
  Quasi-synthetic sequence derived from human genome
FLLPSRPAQRGYHTRLNRLPGAAARCLRKGRRRLVGKVIPL

SEQ ID NO: 33914 - protein, 41 aa, Artificial Sequence
  Quasi-synthetic sequence derived from human genome
HIPWITAVLPTVIICVMVFCLILWKWKKKKRPRNSYKCGTN

SEQ ID NO: 33915 - protein, 41 aa, Artificial Sequence
  Quasi-synthetic sequence derived from human genome
AVIKIQSSYRRWMIRKRMREMHRAATFIQSTFRMHRLHMRY

SEQ ID NO: 33916 - protein, 41 aa, Artificial Sequence
  Quasi-synthetic sequence derived from human genome
RLSKITNRLTIQRKSQFMQRLHSYWTLKRQSRNGVPLLRRL

SEQ ID NO: 33917 - protein, 41 aa, Artificial Sequence
  Quasi-synthetic sequence derived from human genome
HSPQIISFFLALTSTALLFLLFFLTLRFSVVKRGRKKLLYI

SEQ ID NO: 33918 - protein, 41 aa, Artificial Sequence
  Quasi-synthetic sequence derived from human genome
MASWLRRKLRGKRRPVIAFCLLMILSAMAVTRFPPQRPSAG

SEQ ID NO: 33919 - protein, 41 aa, Artificial Sequence
  Quasi-synthetic sequence derived from human genome
KAVLQKQGIWSEIHFILTNPRSLKHLCRLKIRKCMGRLHLR

SEQ ID NO: 33920 - protein, 41 aa, Artificial Sequence
  Quasi-synthetic sequence derived from human genome
IRRLLILILKIGRRWTELIRTMESRVLLRTFCLIFGLGAVW

SEQ ID NO: 33921 - protein, 41 aa, Artificial Sequence
  Quasi-synthetic sequence derived from human genome
RTLRDQLLLLHNQLLYERFKRQQHALRNRRLLRKVIKAAAL

SEQ ID NO: 33922 - protein, 41 aa, Artificial Sequence
  Quasi-synthetic sequence derived from human genome
KRILHKTKGKRFTYKFNFNKLVMPNYPFINIRSSGKIQTLL

SEQ ID NO: 33923 - protein, 41 aa, Artificial Sequence
  Quasi-synthetic sequence derived from human genome
RQKYKKMKKAAVIIQTHFRAYIFAMKVLASYQKTRSAVIVL

SEQ ID NO: 33924 - protein, 41 aa, Artificial Sequence
  Quasi-synthetic sequence derived from human genome
RQHKCAIIIQSYYRMHVQQKKWKIMKKAALLIQKYYRAYSI

SEQ ID NO: 33925 - protein, 41 aa, Artificial Sequence
  Quasi-synthetic sequence derived from human genome
RLFHALFFKMAVTYSRLFPPAFRRLFEFFVLLKALFVLFVL

SEQ ID NO: 33926 - protein, 41 aa, Artificial Sequence
  Quasi-synthetic sequence derived from human genome
AAFHLLFDFLAFKNDISFWKKKKSMIGMSTKLWKVKKALKM

SEQ ID NO: 33927 - protein, 41 aa, Artificial Sequence
  Quasi-synthetic sequence derived from human genome
ARRAFQKRQQQQSALRVMQRNCAAYLKLRHWQWWRLFTKVK

SEQ ID NO: 33928 - protein, 41 aa, Artificial Sequence
  Quasi-synthetic sequence derived from human genome
KSGSRPRKPPPRKHTRSWAVLKLLLLLLLFGVAGGLVACRV

SEQ ID NO: 33929 - protein, 41 aa, Artificial Sequence
  Quasi-synthetic sequence derived from human genome
KLILPNKQKNAAKSNLLQCYAFRALRFLFSMERNRPLFKRL

SEQ ID NO: 33930 - protein, 41 aa, Artificial Sequence
  Quasi-synthetic sequence derived from human genome
LKSNWLGLRFLRALRLLELPQILQILRAIKTSNSVKFSKLL

SEQ ID NO: 33931 - protein, 41 aa, Artificial Sequence
  Quasi-synthetic sequence derived from human genome
KSKKICPLYWYKFAKTFLIWNCSPCWLKLKEFVHRIIMAPF

SEQ ID NO: 33932 - protein, 41 aa, Artificial Sequence
  Quasi-synthetic sequence derived from human genome
CKFKFFFQRNPYFRNKLIVKVYEVRSFGQVVSFSTLIMWRR

SEQ ID NO: 33933 - protein, 41 aa, Artificial Sequence
  Quasi-synthetic sequence derived from human genome
HLPIYRHLRRFILSVIVFGSIVLLMLWLPIRIIKSVLPNFL

SEQ ID NO: 33934 - protein, 41 aa, Artificial Sequence
  Quasi-synthetic sequence derived from human genome
MCFLRRPGAPASWIWWRMLRQVLRRGLQSFCHRLGLCVSRH

SEQ ID NO: 33935 - protein, 41 aa, Artificial Sequence
  Quasi-synthetic sequence derived from human genome
MARRGWRRAPLRRGVGSSPRARRLMRPLWLLLAVGVFDWAG

SEQ ID NO: 33936 - protein, 41 aa, Artificial Sequence
  Quasi-synthetic sequence derived from human genome
IRKRLRCRRKTVLVLMCILTAYVLCWAPFYGFTIVRDFFPT

SEQ ID NO: 33937 - protein, 41 aa, Artificial Sequence
  Quasi-synthetic sequence derived from human genome
RWLWRHVDLTLYTMRPKVMWHLLRRYMASRLHSLRMGGYLF

SEQ ID NO: 33938 - protein, 41 aa, Artificial Sequence
  Quasi-synthetic sequence derived from human genome
VLRLMRIFRILKLARHSTGLRSLGATLKYSYKEVGLLLLYL

SEQ ID NO: 33939 - protein, 41 aa, Artificial Sequence
  Quasi-synthetic sequence derived from human genome
VIVQQKLRSSLLTKKQDQAARKIMRFLRRCRHRVKELKKAK

SEQ ID NO: 33940 - protein, 41 aa, Artificial Sequence
  Quasi-synthetic sequence derived from human genome
AWLLYCHKTRLKKILKESRQRHLENFRIRAKHLAANWNRIR

SEQ ID NO: 33941 - protein, 41 aa, Artificial Sequence
  Quasi-synthetic sequence derived from human genome
QLLLAKVMRFERFGRRRVIIKKGQKGNSFYFIYLGTVAITK

SEQ ID NO: 33942 - protein, 41 aa, Artificial Sequence
  Quasi-synthetic sequence derived from human genome
VVVTAVLILLVVRRLRVPKTPAPDGPRYRFRKRDKVLFYGR

SEQ ID NO: 33943 - protein, 41 aa, Artificial Sequence
  Quasi-synthetic sequence derived from human genome
KLLAKRRRMVLEFYVQQEWAAVRLQSWVRMWCVRQRYCRLL

SEQ ID NO: 33944 - protein, 41 aa, Artificial Sequence
  Quasi-synthetic sequence derived from human genome
FAKTWRVHAIFKNVKMKKKIIKDQKLLVIVGGMLLIDLCIL

SEQ ID NO: 33945 - protein, 41 aa, Artificial Sequence
  Quasi-synthetic sequence derived from human genome
KKTFIVLNKGKAIFRFSATPALYLLSPFSVVRRGAIKVLIH

SEQ ID NO: 33946 - protein, 41 aa, Artificial Sequence
  Quasi-synthetic sequence derived from human genome
FLTLKMNISVLVLPLFIFTFLYVQMRKTLRFREQRYSLFKL

SEQ ID NO: 33947 - protein, 41 aa, Artificial Sequence
  Quasi-synthetic sequence derived from human genome
RLRRRGRSGLQPRVGKSTAILLGITTLFTLLWAPRVFVMLY

SEQ ID NO: 33948 - protein, 41 aa, Artificial Sequence
  Quasi-synthetic sequence derived from human genome
RKIGRAGYRLPLAYFLVGMAVFAYSFIILLKKMAKNSRTSL

SEQ ID NO: 33949 - protein, 41 aa, Artificial Sequence
  Quasi-synthetic sequence derived from human genome
VKMRKEVKRIRVLVIRKLVRSVGRLKSKKGTEDALLKNQRR

SEQ ID NO: 33950 - protein, 41 aa, Artificial Sequence
  Quasi-synthetic sequence derived from human genome
KRLGFKGVWKGLFARIIMIGTLTALQWFIYDSVKVYFRLPR

SEQ ID NO: 33951 - protein, 41 aa, Artificial Sequence
  Quasi-synthetic sequence derived from human genome
RKRLCSFLIALYCLFSLYAAYHVFFGRRRQAPAGSPRGLRK

SEQ ID NO: 33952 - protein, 41 aa, Artificial Sequence
  Quasi-synthetic sequence derived from human genome
PFNQKTLKYLLLGRWRKKHLTFRILNLPSTLPPHTARAALR

SEQ ID NO: 33953 - protein, 41 aa, Artificial Sequence
  Quasi-synthetic sequence derived from human genome
ILSYIKIGKNLLRISKRRSKFPNSGKYATTARNSFIVLIIF

SEQ ID NO: 33954 - protein, 41 aa, Artificial Sequence
  Quasi-synthetic sequence derived from human genome
KPLRKPRIPMETFRKVGIPIIIALLSLASIIIVVVLIKVIL

SEQ ID NO: 33955 - protein, 41 aa, Artificial Sequence
  Quasi-synthetic sequence derived from human genome
LWVPQPPPRTIKRTRRRLSRNRDPGRLILSTIRLRPRQVLC

SEQ ID NO: 33956 - protein, 41 aa, Artificial Sequence
  Quasi-synthetic sequence derived from human genome
LKKYKIACIVLLALLVIMSLGLGLGLGLRKLEKQGSCRKKC

SEQ ID NO: 33957 - protein, 41 aa, Artificial Sequence
  Quasi-synthetic sequence derived from human genome
KEFHFNRYLTRRRRIEIAHALCLSERQIKIWFQNRRMKWKK

SEQ ID NO: 33958 - protein, 41 aa, Artificial Sequence
  Quasi-synthetic sequence derived from human genome
TSRVSISVLVPGLLLVFVTSAFTVVGMLVFILRNRKRSKRR

SEQ ID NO: 33959 - protein, 41 aa, Artificial Sequence
  Quasi-synthetic sequence derived from human genome
LKYFRFIGRFIAMALFHGKFIDTGFSLPFYKRILNKPVGLK

SEQ ID NO: 33960 - protein, 41 aa, Artificial Sequence
  Quasi-synthetic sequence derived from human genome
KKNPKLINALRRCFFWRFMFYGIFLYLGEVTKAVQPLLLGR

SEQ ID NO: 33961 - protein, 41 aa, Artificial Sequence
  Quasi-synthetic sequence derived from human genome
LKKGKLCFCCRTRRFSFFTWSYTCQFCKRPVCSQCCKKMRL

SEQ ID NO: 33962 - protein, 41 aa, Artificial Sequence
  Quasi-synthetic sequence derived from human genome
LPRKKLKHIRQGTNKGLIKKKLKNMLAAVVTKKKTHKYNCK

SEQ ID NO: 33963 - protein, 41 aa, Artificial Sequence
  Quasi-synthetic sequence derived from human genome
YWKAAFCLTDVHKMPYFTRLILFLFCLMVLVESRKPKRKRW

SEQ ID NO: 33964 - protein, 41 aa, Artificial Sequence
  Quasi-synthetic sequence derived from human genome
HKVAVKILNRQKIRSLDVVGKIRREIQNLKLFRHPHIIKLY

SEQ ID NO: 33965 - protein, 41 aa, Artificial Sequence
  Quasi-synthetic sequence derived from human genome
RVAKKLWLCNMIGDVTTEQYFALRRKKKKTIKMLMLVVVLF

SEQ ID NO: 33966 - protein, 41 aa, Artificial Sequence
  Quasi-synthetic sequence derived from human genome
PWRVIGYHVVVWMMAGIPLLLFRWKPLWGVRLRLRPCNLAH

SEQ ID NO: 33967 - protein, 41 aa, Artificial Sequence
  Quasi-synthetic sequence derived from human genome
MKMAVMIFKRGVFESRRKNKAVFRPKIRINLREVQTLSWPR

SEQ ID NO: 33968 - protein, 41 aa, Artificial Sequence
  Quasi-synthetic sequence derived from human genome
KTLLRCRNEKKRHRAVRVIFTIMIVYFLFWTPYNIVILLNT

SEQ ID NO: 33969 - protein, 41 aa, Artificial Sequence
  Quasi-synthetic sequence derived from human genome
RGLILPVRTLLLKFFSKIYQTEELRSCRFRYRSKVLSRWLA

SEQ ID NO: 33970 - protein, 41 aa, Artificial Sequence
  Quasi-synthetic sequence derived from human genome
FLITFLFGMVVLALVVWKIFTLSRATAVKERGKNRKKVLTL

SEQ ID NO: 33971 - protein, 41 aa, Artificial Sequence
  Quasi-synthetic sequence derived from human genome
RRPGAPASWIWWRMLRQVLRRGLQSFCHRLGLCVSRHPVFF

SEQ ID NO: 33972 - protein, 41 aa, Artificial Sequence
  Quasi-synthetic sequence derived from human genome
RRRKKKERRPRGTMQAINNERKASKVLGIVFFVFLIMWCPF

SEQ ID NO: 33973 - protein, 41 aa, Artificial Sequence
  Quasi-synthetic sequence derived from human genome
WHWQKKVINKGLFFLGSLIAISSTYLLIHYMSPRSFLRLRR

SEQ ID NO: 33974 - protein, 41 aa, Artificial Sequence
  Quasi-synthetic sequence derived from human genome
RWHWQKKVINKGLFFLGSLIAISSTYLLIHYMSPRSFLRLR

SEQ ID NO: 33975 - protein, 41 aa, Artificial Sequence
  Quasi-synthetic sequence derived from human genome
FWRNKKSNKVLPMRRVLRKRPSPAPRTIRIEWLKSKSTKAA

SEQ ID NO: 33976 - protein, 41 aa, Artificial Sequence
  Quasi-synthetic sequence derived from human genome
LLVGQASQREGRLQHGNMRKNMRVLSRISKFRRLRQLLRRR

SEQ ID NO: 33977 - protein, 41 aa, Artificial Sequence
  Quasi-synthetic sequence derived from human genome
QKSLVYGLVGAGVVLMLIILVALLMLVFRSKREVKRQKYRL

SEQ ID NO: 33978 - protein, 41 aa, Artificial Sequence
  Quasi-synthetic sequence derived from human genome
FYAYVEMKRKKRVHFHGFMLDVHKRIHRLKQSLPKRKPGFM

SEQ ID NO: 33979 - protein, 41 aa, Artificial Sequence
  Quasi-synthetic sequence derived from human genome
TVKAIAIVIPCILALCLLVLVYTVFQFKRKGTPRHILYCKR

SEQ ID NO: 33980 - protein, 41 aa, Artificial Sequence
  Quasi-synthetic sequence derived from human genome
CLKQKARRLTILLLLAFYVCFLPFHILRVIRIESRLLSISC

SEQ ID NO: 33981 - protein, 41 aa, Artificial Sequence
  Quasi-synthetic sequence derived from human genome
RGRRRTRAAGSLLSRAAILLFISAFLVRVPSSVGHLVRLPR

SEQ ID NO: 33982 - protein, 41 aa, Artificial Sequence
  Quasi-synthetic sequence derived from human genome
KMFPKVRESQLLLNVVSQLAKRNLRLLVLGRKHMLRRSSQW

SEQ ID NO: 33983 - protein, 41 aa, Artificial Sequence
  Quasi-synthetic sequence derived from human genome
LRAVRVGLLLGGGGVYGSRFRFTFPGCRALSPWRVRVQRRR

SEQ ID NO: 33984 - protein, 41 aa, Artificial Sequence
  Quasi-synthetic sequence derived from human genome
AKRFALKTRSQITKRKRMSLVKEKKAAQTLSAILLAFIITW

SEQ ID NO: 33985 - protein, 41 aa, Artificial Sequence
  Quasi-synthetic sequence derived from human genome
PQTRRRRRAKITGRERKAMRVLPVVVGAFLLCWTPFFVVHI

SEQ ID NO: 33986 - protein, 41 aa, Artificial Sequence
  Quasi-synthetic sequence derived from human genome
SLRIARFRFRAFHFLNRFPSVYLRCKMVVCRAYDPSSRCYR

SEQ ID NO: 33987 - protein, 41 aa, Artificial Sequence
  Quasi-synthetic sequence derived from human genome
KFKHLKKLLLAHGHLYYVRIAHLVQYFFYKNLCFILPQFLY

SEQ ID NO: 33988 - protein, 41 aa, Artificial Sequence
  Quasi-synthetic sequence derived from human genome
VHHVLIWIHCFTVYLVPCSIFFILNSIIVYKLRRKSNFRLR

SEQ ID NO: 33989 - protein, 41 aa, Artificial Sequence
  Quasi-synthetic sequence derived from human genome
LKIYIRKRRPSKPHMFPKILMKITDLRSISAKGAERVITLK

SEQ ID NO: 33990 - protein, 41 aa, Artificial Sequence
  Quasi-synthetic sequence derived from human genome
RYWAISRPFRYKRKMTQRMALVMVGLAWTLSILISFIPVQL

SEQ ID NO: 33991 - protein, 41 aa, Artificial Sequence
  Quasi-synthetic sequence derived from human genome
LLVVRFDPASPSSLHFLYKLAQLFRWIRKAAFSRLYQLRIR

SEQ ID NO: 33992 - protein, 41 aa, Artificial Sequence
  Quasi-synthetic sequence derived from human genome
KQNIFYFLYGKTRSRIPLIALFQKLRFQFFCSMSGRAWVSR

SEQ ID NO: 33993 - protein, 41 aa, Artificial Sequence
  Quasi-synthetic sequence derived from human genome
LKKTAIKIQSVYRGIRVRRHIQHMHRAATFIKAMFKMHQSR

SEQ ID NO: 33994 - protein, 41 aa, Artificial Sequence
  Quasi-synthetic sequence derived from human genome
VLKTLTKPVTLSRSKINKTKVLKMIFVHLIIFCFCFVPYNI

SEQ ID NO: 33995 - protein, 41 aa, Artificial Sequence
  Quasi-synthetic sequence derived from human genome
AVLHERYLARGCARRARGRWEGSAPRRLLLALHRRLRGLRR

SEQ ID NO: 33996 - protein, 41 aa, Artificial Sequence
  Quasi-synthetic sequence derived from human genome
RHKLLKLSVLLPLIFTILLLLLVAASLLAWRMMKYQQKGTA

SEQ ID NO: 33997 - protein, 41 aa, Artificial Sequence
  Quasi-synthetic sequence derived from human genome
NRPKISAFLPARQLWKWSGNPTQRRGMKGKARKLFYKAIVR

SEQ ID NO: 33998 - protein, 41 aa, Artificial Sequence
  Quasi-synthetic sequence derived from human genome
KCLYSRITVNTAFGTKFSHISFIILFKVFLFPRITISKKTK

SEQ ID NO: 33999 - protein, 41 aa, Artificial Sequence
  Quasi-synthetic sequence derived from human genome
AFPARLKKVLIVGAPIWFRVPYSIISLLLKDKVRERIQILK

SEQ ID NO: 34000 - protein, 41 aa, Artificial Sequence
  Quasi-synthetic sequence derived from human genome
KKKLMAARERKATKTLGIILGAFIVCWLPFFIISLVMPICK

SEQ ID NO: 34001 - protein, 42 aa, Artificial Sequence
  Quasi-synthetic sequence derived from human genome
KGLLIFLLLVILAMGLWVIRVQKRHKMPRMKKLMRNRMKLRK

SEQ ID NO: 34002 - protein, 42 aa, Artificial Sequence
  Quasi-synthetic sequence derived from human genome
RLIPIIVLLLQKAWRGTLARWRCRRLRAIYTIMRWFRRHKVR

SEQ ID NO: 34003 - protein, 42 aa, Artificial Sequence
  Quasi-synthetic sequence derived from human genome
IKLLRNIPRWTHLLRLLRLIILLRIFHLFHQKRQLEKLIRRR

SEQ ID NO: 34004 - protein, 42 aa, Artificial Sequence
  Quasi-synthetic sequence derived from human genome
KLLRNIPRWTHLLRLLRLIILLRIFHLFHQKRQLEKLIRRRV

SEQ ID NO: 34005 - protein, 42 aa, Artificial Sequence
  Quasi-synthetic sequence derived from human genome
KIKVRFSFFLQIYLIMIFLGLYINFRHLYKQRRRRYGQKKKK

SEQ ID NO: 34006 - protein, 42 aa, Artificial Sequence
  Quasi-synthetic sequence derived from human genome
IKLLRNIPRWTHLVRLLRLIILIRIFHLLHQKRQLEKLMRRL

SEQ ID NO: 34007 - protein, 42 aa, Artificial Sequence
  Quasi-synthetic sequence derived from human genome
KTAFRIYAVSTLLLFLLFFLFRLLLRFLRLCRSFYITCRRLR

SEQ ID NO: 34008 - protein, 42 aa, Artificial Sequence
  Quasi-synthetic sequence derived from human genome
EIRIFKRKKRIKRRALLFLSYILTHFIFLALLLILIVLLRHT

SEQ ID NO: 34009 - protein, 42 aa, Artificial Sequence
  Quasi-synthetic sequence derived from human genome
RPHRIAGVKRFLKHAGKWSLRWFLSPRWILQFRRWARKWSRF

SEQ ID NO: 34010 - protein, 42 aa, Artificial Sequence
  Quasi-synthetic sequence derived from human genome
CRSTWLRVRKARPQLILSRRPRRRLGSLRWCGRRRLRWRLLQ

SEQ ID NO: 34011 - protein, 42 aa, Artificial Sequence
  Quasi-synthetic sequence derived from human genome
KKKKKRYLRASSNRNFLLTMRPFLKRAILVLSYVLVILYFRL

SEQ ID NO: 34012 - protein, 42 aa, Artificial Sequence
  Quasi-synthetic sequence derived from human genome
KFWRRYGKLSRHLMKVKLKKYTKFLFVRDPFVRLISAFRSKF

SEQ ID NO: 34013 - protein, 42 aa, Artificial Sequence
  Quasi-synthetic sequence derived from human genome
RKQYRKVLYCVVIIQKNYRAFLLRRRFLHLKKAAIVFQKQLR

SEQ ID NO: 34014 - protein, 42 aa, Artificial Sequence
  Quasi-synthetic sequence derived from human genome
KRKKKKKFCYLCILLLIVLFILLCCLYRLCKKSKPIKKQQDV

SEQ ID NO: 34015 - protein, 42 aa, Artificial Sequence
  Quasi-synthetic sequence derived from human genome
KLLVHSLNLLAKQGLRLLRGLRRRNVQKKVALAKKLLAKLRF

SEQ ID NO: 34016 - protein, 42 aa, Artificial Sequence
  Quasi-synthetic sequence derived from human genome
IQKYWRMYVVRRRYKIRRAATIVLQSYLRGFLARNRYRKILR

SEQ ID NO: 34017 - protein, 42 aa, Artificial Sequence
  Quasi-synthetic sequence derived from human genome
QMLIRIVLFLQKVWRGTLARMRYKRTKAALTIIRYYRRYKVK

SEQ ID NO: 34018 - protein, 42 aa, Artificial Sequence
  Quasi-synthetic sequence derived from human genome
MNVRMPFRRKIYYLPRRYKFMSRIDKQISRFRRWLPKKPMRL

SEQ ID NO: 34019 - protein, 42 aa, Artificial Sequence
  Quasi-synthetic sequence derived from human genome
HRISKSKFSRYWRRWNRFCRRKCRAAVKSNVFYWLVIFLVFL

SEQ ID NO: 34020 - protein, 42 aa, Artificial Sequence
  Quasi-synthetic sequence derived from human genome
FLYGKNRSRIPLLRKRWFQLGRSMNPRARKKRSRIPLLRKRR

SEQ ID NO: 34021 - protein, 42 aa, Artificial Sequence
  Quasi-synthetic sequence derived from human genome
RFRSLLVRRRFISLKKATIFVQRKYRATICAKHKLYQFLHLR

SEQ ID NO: 34022 - protein, 42 aa, Artificial Sequence
  Quasi-synthetic sequence derived from human genome
RRLLLALHRRLRGLRRAAAGTSRLLFQRLLPCGVIKFRYIWI

SEQ ID NO: 34023 - protein, 42 aa, Artificial Sequence
  Quasi-synthetic sequence derived from human genome
WWRGVLVRRTLLVAALRAWMIQCWWRTLVQRRIRQRRQALLR

SEQ ID NO: 34024 - protein, 42 aa, Artificial Sequence
  Quasi-synthetic sequence derived from human genome
RKKRSRIPLLRKRRFQLGRSMNPRARKNRSRIPLLRKRRFQL

SEQ ID NO: 34025 - protein, 42 aa, Artificial Sequence
  Quasi-synthetic sequence derived from human genome
IQLAVINFLAKQRLRKRVNAALVIQKYWRRVLAQRKLLMLKK

SEQ ID NO: 34026 - protein, 42 aa, Artificial Sequence
  Quasi-synthetic sequence derived from human genome
RRVIAAFYFPKREKKRILFLYNDLLKKRAAFTKLRRAAILRR

SEQ ID NO: 34027 - protein, 42 aa, Artificial Sequence
  Quasi-synthetic sequence derived from human genome
KRALGRRKGVWLRLRKILFCVLGLYIAIPFLIKLCPGIQAKL

SEQ ID NO: 34028 - protein, 42 aa, Artificial Sequence
  Quasi-synthetic sequence derived from human genome
FLYRKNRSRIPLLRKRWFQLGHSMNPRARKNRSRIPLLRKRR

SEQ ID NO: 34029 - protein, 42 aa, Artificial Sequence
  Quasi-synthetic sequence derived from human genome
RKTVKAVIDRFLRLHCGLWVRRKAGYKKKLWKKTPARKKRLR

SEQ ID NO: 34030 - protein, 42 aa, Artificial Sequence
  Quasi-synthetic sequence derived from human genome
LIQRRFRTLMMRRRFLSLKKTAILIQRKYRAHLCTKHHLQFL

SEQ ID NO: 34031 - protein, 42 aa, Artificial Sequence
  Quasi-synthetic sequence derived from human genome
KLGVLLRRVTRNLVRNKLAVITRLLQNLIMGLFLLFFVLRVR

SEQ ID NO: 34032 - protein, 42 aa, Artificial Sequence
  Quasi-synthetic sequence derived from human genome
GFFIKRRFRSLRHKIILLQSRARGYLARQRYQQMRRSLVKFR

SEQ ID NO: 34033 - protein, 42 aa, Artificial Sequence
  Quasi-synthetic sequence derived from human genome
SVIYIQAIFRGKKARRHLKMMHIAATLIQRRFRTLMMRRRFL

SEQ ID NO: 34034 - protein, 42 aa, Artificial Sequence
  Quasi-synthetic sequence derived from human genome
GLARKKSGILLLTLVSFLIFILFIIVQLFIMKLRKAHVIWKK

SEQ ID NO: 34035 - protein, 42 aa, Artificial Sequence
  Quasi-synthetic sequence derived from human genome
LKVLFKKTHRILRRLFNLCKRCHRQPRFRLPKERSLSYWWNR

SEQ ID NO: 34036 - protein, 42 aa, Artificial Sequence
  Quasi-synthetic sequence derived from human genome
RSRIPLLRKRRFQLYRSMNPRARKNRSHIPLVRKRRFQLRRC

SEQ ID NO: 34037 - protein, 42 aa, Artificial Sequence
  Quasi-synthetic sequence derived from human genome
KNVLKIRRRKMNHHKYRKLVKKTRFLRRKVQEGRLRRKQIKF

SEQ ID NO: 34038 - protein, 42 aa, Artificial Sequence
  Quasi-synthetic sequence derived from human genome
PFIVTLLVYIKIYIVLRRRRKRVNTKRSSRAFRAHLRAPLKG

SEQ ID NO: 34039 - protein, 42 aa, Artificial Sequence
  Quasi-synthetic sequence derived from human genome
IKLLPLRTFRVFRALKAISVVSRLKVIVGALLRSVKKLVNVI

SEQ ID NO: 34040 - protein, 42 aa, Artificial Sequence
  Quasi-synthetic sequence derived from human genome
QAISKSKLSRRWRRWNRFNRRRCRAAVKSVTFYWLVIVLVFL

SEQ ID NO: 34041 - protein, 42 aa, Artificial Sequence
  Quasi-synthetic sequence derived from human genome
RLCLRLLLLLGYRRRCPPLLRGLVQRWRYGKVCLRSLLYNSF

SEQ ID NO: 34042 - protein, 42 aa, Artificial Sequence
  Quasi-synthetic sequence derived from human genome
ALRAPRKKIHRRVLKKNPLKNLRIMLKLNPYAKTMRRNTILR

SEQ ID NO: 34043 - protein, 42 aa, Artificial Sequence
  Quasi-synthetic sequence derived from human genome
LPRRRGRPSRRFLGKKYRKYYYKSPKPLLRPFLCRICGSRFL

SEQ ID NO: 34044 - protein, 42 aa, Artificial Sequence
  Quasi-synthetic sequence derived from human genome
YLHAKLLKKRSKQPLGEVKRRLSLYLTKIHFWLPVLKMIRKK

SEQ ID NO: 34045 - protein, 42 aa, Artificial Sequence
  Quasi-synthetic sequence derived from human genome
KNRSRIPLLRKRRFQLGRSMNLRARKNRSQIVLFQKRRFQFF

SEQ ID NO: 34046 - protein, 42 aa, Artificial Sequence
  Quasi-synthetic sequence derived from human genome
LNKIMKTRVCRRLRRANRVLRARCRRAVKSNACYWAVLLLVF

SEQ ID NO: 34047 - protein, 42 aa, Artificial Sequence
  Quasi-synthetic sequence derived from human genome
RLYLQKKIIQKHFEKKKDIRRGIGYLKLICFLIPFLLSLKKK

SEQ ID NO: 34048 - protein, 42 aa, Artificial Sequence
  Quasi-synthetic sequence derived from human genome
RAYRRSQRASFKRARRPGARALRLVLGIVLLFWACFLPFWLW

SEQ ID NO: 34049 - protein, 42 aa, Artificial Sequence
  Quasi-synthetic sequence derived from human genome
RKNRSRIPLLRKRRFQLYRSTNPRARKNRSRIPLLRKRRFQL

SEQ ID NO: 34050 - protein, 42 aa, Artificial Sequence
  Quasi-synthetic sequence derived from human genome
KTRSRIPLLRKRRFQLCRCMNPRARKNRSQIVLFQKLRFQFF

SEQ ID NO: 34051 - protein, 42 aa, Artificial Sequence
  Quasi-synthetic sequence derived from human genome
LYRKNRSRIPLLRKPWFQLGHSMNPRARKNRSRIPLLRKRRF

SEQ ID NO: 34052 - protein, 42 aa, Artificial Sequence
  Quasi-synthetic sequence derived from human genome
KLTKWKHSRTMMLVVFKSAPILKRALKVKQAMLQLYVLKLLK

SEQ ID NO: 34053 - protein, 42 aa, Artificial Sequence
  Quasi-synthetic sequence derived from human genome
LKKKRRNFAELKIKRLRKKFAQKMLRKARRKLIYEKAKHYHK

SEQ ID NO: 34054 - protein, 42 aa, Artificial Sequence
  Quasi-synthetic sequence derived from human genome
RRMRILRRLLRRYRESKKIDRHMYHSLYLKVKGNVFKNKRIL

SEQ ID NO: 34055 - protein, 42 aa, Artificial Sequence
  Quasi-synthetic sequence derived from human genome
RRIRYEFKAKNIKKKKVSIMVSVDGVKVILKKKKKLLLLQKK

SEQ ID NO: 34056 - protein, 42 aa, Artificial Sequence
  Quasi-synthetic sequence derived from human genome
RLRELRIRCVARKFLYLWIRMTFGRVFPSKARFYYEQRLLRK

SEQ ID NO: 34057 - protein, 42 aa, Artificial Sequence
  Quasi-synthetic sequence derived from human genome
FWPILVMYFIMLFCITMKRQIKHMIKYRYIPFTHGKRRYRGK

SEQ ID NO: 34058 - protein, 42 aa, Artificial Sequence
  Quasi-synthetic sequence derived from human genome
KFILWRRFRWAIILFIILFILLLFLAIFIYAFPNYAAMKLVK

SEQ ID NO: 34059 - protein, 42 aa, Artificial Sequence
  Quasi-synthetic sequence derived from human genome
RRRCFLLTFYLWFLFFSRFLLMLFLPLLTSVVTFLPPLRARR

SEQ ID NO: 34060 - protein, 42 aa, Artificial Sequence
  Quasi-synthetic sequence derived from human genome
KNRSRIPLLRKRRFQLYRSMNSRARKNRSQIVLFQKRRFHFF

SEQ ID NO: 34061 - protein, 42 aa, Artificial Sequence
  Quasi-synthetic sequence derived from human genome
VPLSVLILSLLVLFFSAVFVAAGLFAYVLRRRRKKLPFRSKR

SEQ ID NO: 34062 - protein, 42 aa, Artificial Sequence
  Quasi-synthetic sequence derived from human genome
SFLFVLMLLFFTILVLSYFRYMRIYRRYIYEPLHKPQRKRKK

SEQ ID NO: 34063 - protein, 42 aa, Artificial Sequence
  Quasi-synthetic sequence derived from human genome
RWGQAISKSKLSRRWRRWNRFNRRRCRAAVKSVTFYWLVIVL

SEQ ID NO: 34064 - protein, 42 aa, Artificial Sequence
  Quasi-synthetic sequence derived from human genome
LIPTILGLFLLALLGLVVKRAVERRKALSRRARRLAVRMRAL

SEQ ID NO: 34065 - protein, 42 aa, Artificial Sequence
  Quasi-synthetic sequence derived from human genome
KFFLLKRFNKEKLGLLLLTFLGIVAAVLVKKYQAVLRRKALL

SEQ ID NO: 34066 - protein, 42 aa, Artificial Sequence
  Quasi-synthetic sequence derived from human genome
LQKKIIQKHFEKKKDIRRGIGYLKLICFLIPFLLSLKKKMKV

SEQ ID NO: 34067 - protein, 42 aa, Artificial Sequence
  Quasi-synthetic sequence derived from human genome
TWKCYKARKFFLFYRQQKWASGVIAIAWLLYCHKTRLKKILK

SEQ ID NO: 34068 - protein, 42 aa, Artificial Sequence
  Quasi-synthetic sequence derived from human genome
KLRADKLRAACIRIQKTIRGWLLRKKYLRMRKAAITMQRYVR

SEQ ID NO: 34069 - protein, 42 aa, Artificial Sequence
  Quasi-synthetic sequence derived from human genome
RPKLSGRLGLLGRRGFSGRLGGYWKTWIFWKTWIFWKTWIFR

SEQ ID NO: 34070 - protein, 42 aa, Artificial Sequence
  Quasi-synthetic sequence derived from human genome
KNRSHIPLVRKRRFQLRRCMNPRARKNRSQIVLFQKRRFHFF

SEQ ID NO: 34071 - protein, 42 aa, Artificial Sequence
  Quasi-synthetic sequence derived from human genome
KLTKWKHSRTMMLVVFKSAPILKRALKVKQAMMQLYVLKLLK

SEQ ID NO: 34072 - protein, 42 aa, Artificial Sequence
  Quasi-synthetic sequence derived from human genome
RTPILMTILINFLIFIRILGILLSKLRTRQMRCRDYRLRLAR

SEQ ID NO: 34073 - protein, 42 aa, Artificial Sequence
  Quasi-synthetic sequence derived from human genome
FANIGFFRRKLIDAVGFSPLRILRKRNKALRKIRKLQKQGLL

SEQ ID NO: 34074 - protein, 42 aa, Artificial Sequence
  Quasi-synthetic sequence derived from human genome
CLFLVQKKPLIFLGCCFFSTLVLLLSIAIFQRQKRRKFWKAK

SEQ ID NO: 34075 - protein, 42 aa, Artificial Sequence
  Quasi-synthetic sequence derived from human genome
RLKNIRKVYGRCMWYRLRLLKPQPNIIPTVKKIVLLAGWALF

SEQ ID NO: 34076 - protein, 42 aa, Artificial Sequence
  Quasi-synthetic sequence derived from human genome
LLRICRVLRSLKLLAQFRQIQIIILVLVRALKSMTFLLMLLL

SEQ ID NO: 34077 - protein, 42 aa, Artificial Sequence
  Quasi-synthetic sequence derived from human genome
AWWRGMLVRRTLLHAALRAWIIQCWWRQVLEKLLAKRRRMVL

SEQ ID NO: 34078 - protein, 42 aa, Artificial Sequence
  Quasi-synthetic sequence derived from human genome
AARVARWRRLRLQQLRRLRGLLRVLRGRPGAGSRRRGRMALC

SEQ ID NO: 34079 - protein, 42 aa, Artificial Sequence
  Quasi-synthetic sequence derived from human genome
WRQKFLRVKRSAICIQSWWRGTLGRRKAAKRKWAAQTIRRLI

SEQ ID NO: 34080 - protein, 42 aa, Artificial Sequence
  Quasi-synthetic sequence derived from human genome
RKNRSRIPLLRKRRFQLYRSTNPRARKNRSRIPLLRKHRFQL

SEQ ID NO: 34081 - protein, 42 aa, Artificial Sequence
  Quasi-synthetic sequence derived from human genome
KAKRCNRRLKSQILLKKYLMKRRWKKNFIAVSAANRFKKISS

SEQ ID NO: 34082 - protein, 42 aa, Artificial Sequence
  Quasi-synthetic sequence derived from human genome
FRVIRLARIGRILRLIRAAKGIRTLLFALMMSLPALFNIGLL

SEQ ID NO: 34083 - protein, 42 aa, Artificial Sequence
  Quasi-synthetic sequence derived from human genome
RRRGFGLFFFLRLHRLLLLFLVLRGTLANKLNVPQVLLPFGR

SEQ ID NO: 34084 - protein, 42 aa, Artificial Sequence
  Quasi-synthetic sequence derived from human genome
RYVRGYQARCYAKFLRRTKAATIIQKYWRMYVVRRRYKIRRA

SEQ ID NO: 34085 - protein, 42 aa, Artificial Sequence
  Quasi-synthetic sequence derived from human genome
SNRSKQLRRQMWWRGCKIKAIMALVAAILLLVIIILIVMKYR

SEQ ID NO: 34086 - protein, 42 aa, Artificial Sequence
  Quasi-synthetic sequence derived from human genome
TKIQAWWRGTLVRRALLHAALSACIIQCWWRLILSKILKKRR

SEQ ID NO: 34087 - protein, 42 aa, Artificial Sequence
  Quasi-synthetic sequence derived from human genome
KAKQRLKRLRNIHYLFNTALFLIAWRLLIARSQMARNVWFFI

SEQ ID NO: 34088 - protein, 42 aa, Artificial Sequence
  Quasi-synthetic sequence derived from human genome
LYMCHKCKKKQKSTKKFWIQKLPKVLCLHLKRFHWTAYLRNK

SEQ ID NO: 34089 - protein, 42 aa, Artificial Sequence
  Quasi-synthetic sequence derived from human genome
LLVAGVLVLLVSLGVAIHLCCRRRRARLRFMKQKFNIVCLKI

SEQ ID NO: 34090 - protein, 42 aa, Artificial Sequence
  Quasi-synthetic sequence derived from human genome
PFIVTLLVYIKIYIVLRRRRKRVNTKRSSRAFRAHLRAPLKE

SEQ ID NO: 34091 - protein, 42 aa, Artificial Sequence
  Quasi-synthetic sequence derived from human genome
RARPGAWRRDIFGRIIWHKFKQWVIPWHLNKRYNRKRFFALP

SEQ ID NO: 34092 - protein, 42 aa, Artificial Sequence
  Quasi-synthetic sequence derived from human genome
FNFILVVMFWLIFLLIILSYIKIGKNLLRISKRRSKFPNSGK

SEQ ID NO: 34093 - protein, 42 aa, Artificial Sequence
  Quasi-synthetic sequence derived from human genome
LLVLLALAAWASRWLRRKLRARRKGGAPVHVRHMYSTRRPLR

SEQ ID NO: 34094 - protein, 42 aa, Artificial Sequence
  Quasi-synthetic sequence derived from human genome
FVRGYLVRKQMRLQRKAVISLQSYFRMRKARQYYLKMYKAII

SEQ ID NO: 34095 - protein, 42 aa, Artificial Sequence
  Quasi-synthetic sequence derived from human genome
KYFVSPTLFRVIRLARIGRILRLIKGAKGIRTLLFALMMSLP

SEQ ID NO: 34096 - protein, 42 aa, Artificial Sequence
  Quasi-synthetic sequence derived from human genome
FRVIRLARIGRILRLIRGAKGIRTLLFALMMSLPALFNIGLL

SEQ ID NO: 34097 - protein, 42 aa, Artificial Sequence
  Quasi-synthetic sequence derived from human genome
ALRRKKKKTIKMLMLVVVLFALCWFPLNCYVLLLSSKVIRTN

SEQ ID NO: 34098 - protein, 42 aa, Artificial Sequence
  Quasi-synthetic sequence derived from human genome
RALALFVLTCVVLTFLGHRLLKRLLGPKLRRFLKPQGHPRLL

SEQ ID NO: 34099 - protein, 42 aa, Artificial Sequence
  Quasi-synthetic sequence derived from human genome
PMSLKLTCSAFRLQRALRFLLGRLPWRVASGARRFRRWLNRY

SEQ ID NO: 34100 - protein, 42 aa, Artificial Sequence
  Quasi-synthetic sequence derived from human genome
KIPSIATGMVGALLLLLVVALGIGLFMRRRHIVRKRTLRRLL

SEQ ID NO: 34101 - protein, 42 aa, Artificial Sequence
  Quasi-synthetic sequence derived from human genome
FRVIRLARIGRILRLIKGAKGIRTLLFALMMSLPALFNIGLL

SEQ ID NO: 34102 - protein, 42 aa, Artificial Sequence
  Quasi-synthetic sequence derived from human genome
LFRVIRLARIGRILRLIKGAKGIRTLLFALMMSLPALFNIGL

SEQ ID NO: 34103 - protein, 42 aa, Artificial Sequence
  Quasi-synthetic sequence derived from human genome
PLIYPCSSREFKRAFLRLLRCQCRRRRRRRPLWRVYGHHWRA

SEQ ID NO: 34104 - protein, 42 aa, Artificial Sequence
  Quasi-synthetic sequence derived from human genome
ALFVYLNRKIVQVMRKQKTINRFLMRKRLLFPALVTLLISTL

SEQ ID NO: 34105 - protein, 42 aa, Artificial Sequence
  Quasi-synthetic sequence derived from human genome
RPWGAWLSARLWKWLKSPRSWRLGLALLLGGALLFWVLLHRR

SEQ ID NO: 34106 - protein, 42 aa, Artificial Sequence
  Quasi-synthetic sequence derived from human genome
VLILLVVRRLRVPKTPAPDGPRYRFRKRDKVLFYGRKIMRKV

SEQ ID NO: 34107 - protein, 42 aa, Artificial Sequence
  Quasi-synthetic sequence derived from human genome
VLILFMFRRLRQFRQAQPTPQYRFRKRDKVMFYGRKIMRKVT

SEQ ID NO: 34108 - protein, 42 aa, Artificial Sequence
  Quasi-synthetic sequence derived from human genome
WRRYRAKKYLCKVKAACKIQAWYRCWRAHKEYLAILKAVKII

SEQ ID NO: 34109 - protein, 42 aa, Artificial Sequence
  Quasi-synthetic sequence derived from human genome
KILTVRVILAPWKKGLIAVVIIGVIIALLIIAAKCYFLRKAK

SEQ ID NO: 34110 - protein, 42 aa, Artificial Sequence
  Quasi-synthetic sequence derived from human genome
KNRSRIPLLRKHRFQLYRSMNSRARKNRSQIVLFQKRRFHFF

SEQ ID NO: 34111 - protein, 42 aa, Artificial Sequence
  Quasi-synthetic sequence derived from human genome
MRRLRRLAHLVLFCPFSKRLQGRLPGLRVRCIFLAWLGVFAG

SEQ ID NO: 34112 - protein, 42 aa, Artificial Sequence
  Quasi-synthetic sequence derived from human genome
THLVRLLRLIILIRIFHLLHQKRQLEKLMRRLVSENKRRYTR

SEQ ID NO: 34113 - protein, 42 aa, Artificial Sequence
  Quasi-synthetic sequence derived from human genome
KFIVWRRFKWVIIGLLFLLILLLFVAVLLYSLPNYLSMKIVK

SEQ ID NO: 34114 - protein, 42 aa, Artificial Sequence
  Quasi-synthetic sequence derived from human genome
LHRSRKLHQQYRLARQRIIQFQARCRAYLVRKAFRHRLWAVL

SEQ ID NO: 34115 - protein, 42 aa, Artificial Sequence
  Quasi-synthetic sequence derived from human genome
RGFLARRRYRKMLEEHKAVILQKYARAWLARRRFQSIRRFVL

SEQ ID NO: 34116 - protein, 42 aa, Artificial Sequence
  Quasi-synthetic sequence derived from human genome
PRLPVKKIRKQMKLLLLLLLLSCAAWLTYVHLGLVRQGRALR

SEQ ID NO: 34117 - protein, 42 aa, Artificial Sequence
  Quasi-synthetic sequence derived from human genome
FRVIRLARIGRVLRLIRGAKGIRTLLFALMMSLPALFNIGLL

SEQ ID NO: 34118 - protein, 42 aa, Artificial Sequence
  Quasi-synthetic sequence derived from human genome
WIFWKTWIFRKTYIGWKTWIFSGRCGLTGRPGFGGRRRFFWK

SEQ ID NO: 34119 - protein, 42 aa, Artificial Sequence
  Quasi-synthetic sequence derived from human genome
KKYPQPKGQKKKKIVKYGMGGLIILFLIAIIWFPLLFMSLVR

SEQ ID NO: 34120 - protein, 42 aa, Artificial Sequence
  Quasi-synthetic sequence derived from human genome
VLVKRKRTKGKKLLLSIGVLLHKWKNVCIVLTALNFPSILLL

SEQ ID NO: 34121 - protein, 42 aa, Artificial Sequence
  Quasi-synthetic sequence derived from human genome
FRVIRLARIGRILRLVKGAKGIRTLLFALMMSLPALFNIGLL

SEQ ID NO: 34122 - protein, 42 aa, Artificial Sequence
  Quasi-synthetic sequence derived from human genome
GTLKTYLKRFKVMKPKVLRSWCRQILKGLLFLHTRTPPIIHR

SEQ ID NO: 34123 - protein, 42 aa, Artificial Sequence
  Quasi-synthetic sequence derived from human genome
LRVLRVLRPLKTIKRLPKLKAVFDCVVTSLKNVFNILIVYKL

SEQ ID NO: 34124 - protein, 42 aa, Artificial Sequence
  Quasi-synthetic sequence derived from human genome
RMPFRRKIYYLPRRYKFMSRIDKQISRFRRWLPKKPMRLDKE

SEQ ID NO: 34125 - protein, 42 aa, Artificial Sequence
  Quasi-synthetic sequence derived from human genome
IHRPRRRTTRRWKRWFKFRKRKGEKRPRPNHKAVARRAKLKF

SEQ ID NO: 34126 - protein, 42 aa, Artificial Sequence
  Quasi-synthetic sequence derived from human genome
RKYKKNIKALYIVHPTMFIKTLLILFKPLISFKFGQKIFYVN

SEQ ID NO: 34127 - protein, 42 aa, Artificial Sequence
  Quasi-synthetic sequence derived from human genome
LGFIVPFAIIGLCYSLIVRVLVRAHRHRGLRPRRQKALRMIL

SEQ ID NO: 34128 - protein, 42 aa, Artificial Sequence
  Quasi-synthetic sequence derived from human genome
SLFLFFFVLFLCLFFYNCYKGYLPRQCLKFRSALLIGKKKPK

SEQ ID NO: 34129 - protein, 42 aa, Artificial Sequence
  Quasi-synthetic sequence derived from human genome
IRRKVSKIQRFHARSLWTNHKRYGYKKHSYRLVKKLKLQKMK

SEQ ID NO: 34130 - protein, 42 aa, Artificial Sequence
  Quasi-synthetic sequence derived from human genome
RPKIAAFLPARQLWKWFGKPTQRRGMKGKARKLFYKAIVRGK

SEQ ID NO: 34131 - protein, 42 aa, Artificial Sequence
  Quasi-synthetic sequence derived from human genome
RREYVKKRQAAIKLEAHWRGALARKAIQRRKWAVRIIRKFIK

SEQ ID NO: 34132 - protein, 42 aa, Artificial Sequence
  Quasi-synthetic sequence derived from human genome
KGFVMLAVSFLVAAICYFRRLHLYSGHKLKWWIGYLQRKFKR

SEQ ID NO: 34133 - protein, 42 aa, Artificial Sequence
  Quasi-synthetic sequence derived from human genome
KLLRFFYSLFFPGLIVCGTLCVCLVIVLWGIRLLLQRKKKLV

SEQ ID NO: 34134 - protein, 42 aa, Artificial Sequence
  Quasi-synthetic sequence derived from human genome
MAGIRNIGIWFFWIRLYKIRRGRTRPQALLFLCMILLLIVLH

SEQ ID NO: 34135 - protein, 42 aa, Artificial Sequence
  Quasi-synthetic sequence derived from human genome
GFVRQIQLLLWKNWTLRKRQKIRFVVELVWPLSLFLVLIWLR

SEQ ID NO: 34136 - protein, 42 aa, Artificial Sequence
  Quasi-synthetic sequence derived from human genome
HRWKVVLLVRTDKRSDSLIRKKFRMMKIPKPILFGLNIAMKK

SEQ ID NO: 34137 - protein, 42 aa, Artificial Sequence
  Quasi-synthetic sequence derived from human genome
RWKKVQWCSLSVIKLKNKIKYRAEACIKMQKTIRMWLCKRRH

SEQ ID NO: 34138 - protein, 42 aa, Artificial Sequence
  Quasi-synthetic sequence derived from human genome
VFIKVVQFFRILRIFKLIAPKLLQIIDKRMSHQKTFWYGILK

SEQ ID NO: 34139 - protein, 42 aa, Artificial Sequence
  Quasi-synthetic sequence derived from human genome
GICLILIVIFMITKFVQDRHRARRNRLRKDQLKKLPVHKFKK

SEQ ID NO: 34140 - protein, 42 aa, Artificial Sequence
  Quasi-synthetic sequence derived from human genome
IIKIQAWARMWAARRQYLRRLHYFQKNVNSIVKIQAFFRARK

SEQ ID NO: 34141 - protein, 42 aa, Artificial Sequence
  Quasi-synthetic sequence derived from human genome
WSLRRRPARTLGLLLLVVLGFLVLRRLDWSTLVPLRLRHRQL

SEQ ID NO: 34142 - protein, 42 aa, Artificial Sequence
  Quasi-synthetic sequence derived from human genome
LRALRLLRIFKITKYWASLRNLVVSLMSSMKSIISLLFLLFL

SEQ ID NO: 34143 - protein, 42 aa, Artificial Sequence
  Quasi-synthetic sequence derived from human genome
KLVSPKWKNFKGLKLLCRDKIRLNNAIWRAWYIQYVKRRKSP

SEQ ID NO: 34144 - protein, 42 aa, Artificial Sequence
  Quasi-synthetic sequence derived from human genome
FKCLLLTGGCTLLHCFVILPVFLTFFPPSKKHHKKKKRAKRK

SEQ ID NO: 34145 - protein, 42 aa, Artificial Sequence
  Quasi-synthetic sequence derived from human genome
FFMPLGIILFCSFKIVWSLRRRQQLARQARMKKATRFIMVVA

SEQ ID NO: 34146 - protein, 42 aa, Artificial Sequence
  Quasi-synthetic sequence derived from human genome
GVLVLRGNTKINTFNWAKIRKLSFKRKHFLIKLHANILVLCK

SEQ ID NO: 34147 - protein, 42 aa, Artificial Sequence
  Quasi-synthetic sequence derived from human genome
MAFKLLILLIGTWALFFRKRRADMPRVFVFRALLLVLIFLFV

SEQ ID NO: 34148 - protein, 42 aa, Artificial Sequence
  Quasi-synthetic sequence derived from human genome
RYLAICRPLRARVLVTRRRVRALIAVLWAVALLSAGPFLFLV

SEQ ID NO: 34149 - protein, 42 aa, Artificial Sequence
  Quasi-synthetic sequence derived from human genome
MAHLKRLVKLHIKRHYHKKFWKLGAVIFFFIIVLVLMQREVS

SEQ ID NO: 34150 - protein, 42 aa, Artificial Sequence
  Quasi-synthetic sequence derived from human genome
PPKPKLSKFILISSLAILLMVSLLLLSLWKLWRVKKFLIPSV

SEQ ID NO: 34151 - protein, 42 aa, Artificial Sequence
  Quasi-synthetic sequence derived from human genome
LYRSYVRTRGVGKVPRKKVNVKVFIIIAVFFICFVPFHFARI

SEQ ID NO: 34152 - protein, 42 aa, Artificial Sequence
  Quasi-synthetic sequence derived from human genome
RLFRIKCVTRIQAYWRGCVVRKWYRNLRKTVPPTDAKLRKKF

SEQ ID NO: 34153 - protein, 42 aa, Artificial Sequence
  Quasi-synthetic sequence derived from human genome
KRMRVKKLPMILALHLKRFKYMEQLHRYTKLSYRVVFPLELR

SEQ ID NO: 34154 - protein, 42 aa, Artificial Sequence
  Quasi-synthetic sequence derived from human genome
RTLDRRLRKNLRALVVVHATWYVKAFLALLRPFISSKFTRKI

SEQ ID NO: 34155 - protein, 42 aa, Artificial Sequence
  Quasi-synthetic sequence derived from human genome
PFCLKLLLPGLLLLLVVIILILAFWVLPKYKTRKAMRNNVPR

SEQ ID NO: 34156 - protein, 42 aa, Artificial Sequence
  Quasi-synthetic sequence derived from human genome
LSRWQRRLRRAARRQVLSGHLPFCRFRLRYPSLSPSAFWVWK

SEQ ID NO: 34157 - protein, 42 aa, Artificial Sequence
  Quasi-synthetic sequence derived from human genome
IKRKAPRGFLKRVFKRKKPQLRLEKSGDLLVHLNCLLFVHRL

SEQ ID NO: 34158 - protein, 42 aa, Artificial Sequence
  Quasi-synthetic sequence derived from human genome
RRNTPFHERFFRFLLRKLYVFRRSFLMTCISLRNLILGRPSL

SEQ ID NO: 34159 - protein, 42 aa, Artificial Sequence
  Quasi-synthetic sequence derived from human genome
LRALRLLRIFKVTKYWSSLRNLVVSLLNSMKSIISLLFLLFL

SEQ ID NO: 34160 - protein, 42 aa, Artificial Sequence
  Quasi-synthetic sequence derived from human genome
NTFKERLKLFFIKNQRSSLRIRLFNFSLKLLTCLLYIVRVLL

SEQ ID NO: 34161 - protein, 42 aa, Artificial Sequence
  Quasi-synthetic sequence derived from human genome
VVRKILLLQSWFRMVLERRHFLQMKRAAVTIQACWRSYRVRR

SEQ ID NO: 34162 - protein, 42 aa, Artificial Sequence
  Quasi-synthetic sequence derived from human genome
MRRHFRMKLRNLFTKFIRKFGFELVKRLLPEEYHRVLVNIRK

SEQ ID NO: 34163 - protein, 42 aa, Artificial Sequence
  Quasi-synthetic sequence derived from human genome
RKYKKNLKALYVVHPTSFIKVLWNILKPLISHKFGKKVIYFN

SEQ ID NO: 34164 - protein, 42 aa, Artificial Sequence
  Quasi-synthetic sequence derived from human genome
RQRFLKLKYYSIILQSRIRMIIAVTSYKRYLWATVTIQRHWR

SEQ ID NO: 34165 - protein, 42 aa, Artificial Sequence
  Quasi-synthetic sequence derived from human genome
LRSKKAVWHKLLSKQRKRAVVACFRMAPLYNLPRHRSINLFL

SEQ ID NO: 34166 - protein, 42 aa, Artificial Sequence
  Quasi-synthetic sequence derived from human genome
FLAFKNDISFWKKKKSMIGMSTKLWKVKKALKMTIFWRGLMP

SEQ ID NO: 34167 - protein, 42 aa, Artificial Sequence
  Quasi-synthetic sequence derived from human genome
LRKYIYIRSCVVIIQKRFRCFQAQKLYKRRKESILTIQKYYK

SEQ ID NO: 34168 - protein, 42 aa, Artificial Sequence
  Quasi-synthetic sequence derived from human genome
IKSLRVLRVLRPLKTIKRLPKLKAVFDCVVNSLKNVFNILIV

SEQ ID NO: 34169 - protein, 42 aa, Artificial Sequence
  Quasi-synthetic sequence derived from human genome
IKSLRVLRVLRPLKTIKRLPKLKAVFDCVVNSLKNVLNILIV

SEQ ID NO: 34170 - protein, 42 aa, Artificial Sequence
  Quasi-synthetic sequence derived from human genome
LRIIRFLPLFKIIVPILIRIADVQIKKRLSLMYSITKGYIKS

SEQ ID NO: 34171 - protein, 42 aa, Artificial Sequence
  Quasi-synthetic sequence derived from human genome
RLLRALRVLYVMRLARHSLGLRSLGLTMRRCAREFGLLLLFL

SEQ ID NO: 34172 - protein, 42 aa, Artificial Sequence
  Quasi-synthetic sequence derived from human genome
INLAVANTGILVFQGFTKINAFNWAKVRKLSFKRKRFLIKLR

SEQ ID NO: 34173 - protein, 42 aa, Artificial Sequence
  Quasi-synthetic sequence derived from human genome
RFQQFLFAFFIFIMSLLLISGQRPVNLTMRRKLRKHNCLQRR

SEQ ID NO: 34174 - protein, 42 aa, Artificial Sequence
  Quasi-synthetic sequence derived from human genome
IVAAMRRIRYEFKAKNIKKKKVSIMVSVDGVKVILKKKKKKK

SEQ ID NO: 34175 - protein, 42 aa, Artificial Sequence
  Quasi-synthetic sequence derived from human genome
LSSKAARDVLGFLRVVRFVRILRIFKLTRHFVGLRVLGHTLR

SEQ ID NO: 34176 - protein, 42 aa, Artificial Sequence
  Quasi-synthetic sequence derived from human genome
RQWLAIQKLRSKIHKKVDRKASKGRKLRFHVLSKLLSFMAPI

SEQ ID NO: 34177 - protein, 42 aa, Artificial Sequence
  Quasi-synthetic sequence derived from human genome
LYFKPSVFRCIALRWVRLLGFAIVYGTIILKLYRVLQLFLSR

SEQ ID NO: 34178 - protein, 42 aa, Artificial Sequence
  Quasi-synthetic sequence derived from human genome
KSVWYRIAFWLQWFNSFVNPLLYPLCHKRFQKAFLKIFCIKK

SEQ ID NO: 34179 - protein, 42 aa, Artificial Sequence
  Quasi-synthetic sequence derived from human genome
KAKPKKQSKKKVPFWNVQNKIILFTVFLFILAVIAWTLLWLY

SEQ ID NO: 34180 - protein, 42 aa, Artificial Sequence
  Quasi-synthetic sequence derived from human genome
KLLKLRRNIVKLSLYRHFTNTLILAVAASIVFIIWTTMKFRI

SEQ ID NO: 34181 - protein, 42 aa, Artificial Sequence
  Quasi-synthetic sequence derived from human genome
KTRSRIPLVRNRRFQLCRCMNPRARKNRSQIALFQKLRFQFF

SEQ ID NO: 34182 - protein, 42 aa, Artificial Sequence
  Quasi-synthetic sequence derived from human genome
VVKILRVLRVLRPLRAINRAKGLKHVVQCVFVAIRTIGNIMI

SEQ ID NO: 34183 - protein, 42 aa, Artificial Sequence
  Quasi-synthetic sequence derived from human genome
QLQRAGVTLRVLRMMRIFWVIKLARHFIGLQTLGLTLKRCYR

SEQ ID NO: 34184 - protein, 42 aa, Artificial Sequence
  Quasi-synthetic sequence derived from human genome
LSSKAAKDVLGFLRVVRFVRILRIFKLTRHFVGLRVLGHTLR

SEQ ID NO: 34185 - protein, 42 aa, Artificial Sequence
  Quasi-synthetic sequence derived from human genome
LARRKGRHMGIGKRKGTANARMPEKVTWMRRMRILRRLLRRY

SEQ ID NO: 34186 - protein, 42 aa, Artificial Sequence
  Quasi-synthetic sequence derived from human genome
RKKRSWYLTWKYKLTNQRALRRFCQTGAVLFLLVTVIVNIKL

SEQ ID NO: 34187 - protein, 42 aa, Artificial Sequence
  Quasi-synthetic sequence derived from human genome
WRFIRVFIKTIRRDIFGGLVLLKVKAKVRQCLQERRTVPILF

SEQ ID NO: 34188 - protein, 42 aa, Artificial Sequence
  Quasi-synthetic sequence derived from human genome
KISRPKKRAKTITFSKNAVISKRGGKLCLLIRVANLRKSLLI

SEQ ID NO: 34189 - protein, 42 aa, Artificial Sequence
  Quasi-synthetic sequence derived from human genome
KRCIKKFSIQRFPKILVLHLKRFSESRIRTSKLTTFVNFPLR

SEQ ID NO: 34190 - protein, 42 aa, Artificial Sequence
  Quasi-synthetic sequence derived from human genome
LALVGVLILFMFRRLRQFRQAQPTPQYRFRKRDKVMFYGRKI

SEQ ID NO: 34191 - protein, 42 aa, Artificial Sequence
  Quasi-synthetic sequence derived from human genome
TRSIAIIVPLVLLVTLITTLVIGLVLCKRKRRTKTIRRQPII

SEQ ID NO: 34192 - protein, 42 aa, Artificial Sequence
  Quasi-synthetic sequence derived from human genome
VVKILRVLRVLRPLRAINRAKGLKHVVQCVFVAIRTIGNIVI

SEQ ID NO: 34193 - protein, 42 aa, Artificial Sequence
  Quasi-synthetic sequence derived from human genome
FLARNRYRKILREHKAVIIQKRVRGWLARTHYKRSMHAIIYL

SEQ ID NO: 34194 - protein, 42 aa, Artificial Sequence
  Quasi-synthetic sequence derived from human genome
RRRRARSSVCRRKVAQAREKRFTFVLAVVMGVFVLCWFPFFF

SEQ ID NO: 34195 - protein, 42 aa, Artificial Sequence
  Quasi-synthetic sequence derived from human genome
PRRRMPGLGWMKKCYQMIDRRLRKNLKSFIIVHPSWFIRTIL

SEQ ID NO: 34196 - protein, 42 aa, Artificial Sequence
  Quasi-synthetic sequence derived from human genome
IFQGCLYLIYNLLQAVFFVLFVLSVHYLWKKWKKHQKKLKKQ

SEQ ID NO: 34197 - protein, 42 aa, Artificial Sequence
  Quasi-synthetic sequence derived from human genome
HLLTLFHRLCKLLFFRIRPIFVFDGDAPLLKKQTLVKRRQRK

SEQ ID NO: 34198 - protein, 42 aa, Artificial Sequence
  Quasi-synthetic sequence derived from human genome
LPKYKKNLKALYVVHPTSFIKVLWNILKPLISHKFGKKVIYF

SEQ ID NO: 34199 - protein, 42 aa, Artificial Sequence
  Quasi-synthetic sequence derived from human genome
LLLLLVVCGIGCVWHWKHRVATRFTLPRFLQRRSSRRKVCTK

SEQ ID NO: 34200 - protein, 42 aa, Artificial Sequence
  Quasi-synthetic sequence derived from human genome
LRIIRLVRVFRIFKLSRHSKGLQILGHTLRASMRELGLLIFF

SEQ ID NO: 34201 - protein, 42 aa, Artificial Sequence
  Quasi-synthetic sequence derived from human genome
KTFRIKRFLAKKQKQNRPIPQWIRMKTGNKIRYNSKRRHWRR

SEQ ID NO: 34202 - protein, 42 aa, Artificial Sequence
  Quasi-synthetic sequence derived from human genome
FRGWVALVLHLRAHSAAKRPIACPKCERRFWRRKQLRAHLRR

SEQ ID NO: 34203 - protein, 42 aa, Artificial Sequence
  Quasi-synthetic sequence derived from human genome
RRRRAMRAFRMLLYSKSTSLTFHWKLWGRHRGRRRGLAHPKN

SEQ ID NO: 34204 - protein, 42 aa, Artificial Sequence
  Quasi-synthetic sequence derived from human genome
LLSVFRQPLSSLWRSLVPLFCWLRATFWLLATKRRKQQLVLR

SEQ ID NO: 34205 - protein, 42 aa, Artificial Sequence
  Quasi-synthetic sequence derived from human genome
PRRRMPGIGWLKKCYQMIDRRLRKNLKSLIIVHPSWFIRTVL

SEQ ID NO: 34206 - protein, 42 aa, Artificial Sequence
  Quasi-synthetic sequence derived from human genome
LLQISKLKEVTLFVKRLRRKTYLSNMAKTMRMVLKSKRRVSV

SEQ ID NO: 34207 - protein, 42 aa, Artificial Sequence
  Quasi-synthetic sequence derived from human genome
RPKTSFNWFVNPLKTFVFFIWRRYWRTLVLLLLVLLTVFLLL

SEQ ID NO: 34208 - protein, 42 aa, Artificial Sequence
  Quasi-synthetic sequence derived from human genome
MKFFRWVRRAWQRIISWVFFWRQKIKPTISGHPDSKKHSLKK

SEQ ID NO: 34209 - protein, 42 aa, Artificial Sequence
  Quasi-synthetic sequence derived from human genome
RRQKLLLAQLHHRKRVKAAGQIQAWWRGVLVRRTLLVAALRA

SEQ ID NO: 34210 - protein, 42 aa, Artificial Sequence
  Quasi-synthetic sequence derived from human genome
LLRLLGLRRGLRRLRRLWAGPRVQRGRGRGRGRGWGPSRGCV

SEQ ID NO: 34211 - protein, 42 aa, Artificial Sequence
  Quasi-synthetic sequence derived from human genome
FRRLKAHNLCRQIRAACVIQSYWRMRQDRVRFLNLKKTIIKF

SEQ ID NO: 34212 - protein, 42 aa, Artificial Sequence
  Quasi-synthetic sequence derived from human genome
LWFAAWLKVFYCLRIANFNHPLFFLMKRKIIVLMPWLLRLSV

SEQ ID NO: 34213 - protein, 42 aa, Artificial Sequence
  Quasi-synthetic sequence derived from human genome
RVRFLNLKKTIIKFQAHVRKHQQRQKYKKMKKAAVIIQTHFR

SEQ ID NO: 34214 - protein, 42 aa, Artificial Sequence
  Quasi-synthetic sequence derived from human genome
MKHFLRMLIQVCLYFYCKFLWRCLKFVMRKLTGRCELQRICY

SEQ ID NO: 34215 - protein, 42 aa, Artificial Sequence
  Quasi-synthetic sequence derived from human genome
RPRRELSLGRKKAPHRLCGRFSRISMKLPRIPLRRQKLPKVV

SEQ ID NO: 34216 - protein, 42 aa, Artificial Sequence
  Quasi-synthetic sequence derived from human genome
LFVITCLVIFVLVHSFLKKLLGKKLTRCLKPFENSRLRLWTK

SEQ ID NO: 34217 - protein, 42 aa, Artificial Sequence
  Quasi-synthetic sequence derived from human genome
LKIIRPLRNIFLKKPVFAKTVSIFIWFFLFFISLPNTILSNK

SEQ ID NO: 34218 - protein, 42 aa, Artificial Sequence
  Quasi-synthetic sequence derived from human genome
WRRVLAQRKLLMLKKEKLEKVQNKAASLIQAMWRRYRAKKYL

SEQ ID NO: 34219 - protein, 42 aa, Artificial Sequence
  Quasi-synthetic sequence derived from human genome
FLKLFRAARLIKLLRQGYTIRILLWTFVQSFKALPYVCLLIA

SEQ ID NO: 34220 - protein, 42 aa, Artificial Sequence
  Quasi-synthetic sequence derived from human genome
LLRTGGWKVSAVTLAYLIFCLCSLVGILHLQRALVLRRKRKR

SEQ ID NO: 34221 - protein, 42 aa, Artificial Sequence
  Quasi-synthetic sequence derived from human genome
ISKLKEVTLFVKRLRRKTYLSNMAKTMRMVLKSKRRVSVLKS

SEQ ID NO: 34222 - protein, 42 aa, Artificial Sequence
  Quasi-synthetic sequence derived from human genome
ARLLRSRAGSRKRPLTLLQRAGLLLLLGLLGFLALLALMSRL

SEQ ID NO: 34223 - protein, 42 aa, Artificial Sequence
  Quasi-synthetic sequence derived from human genome
SRYPLLLPKGVVLKLKPVATRFPRKAWRQKRSSVLKPLLIQP

SEQ ID NO: 34224 - protein, 42 aa, Artificial Sequence
  Quasi-synthetic sequence derived from human genome
LRVLRMMRIFWVIKLARHFIGLQTLGLTLKRCYREMVMLLVF

SEQ ID NO: 34225 - protein, 42 aa, Artificial Sequence
  Quasi-synthetic sequence derived from human genome
KCLYYLIWKNYKKYIIIAFILIILIIFLVLFIYTLPGAISRR

SEQ ID NO: 34226 - protein, 42 aa, Artificial Sequence
  Quasi-synthetic sequence derived from human genome
RMGVGCRLSRALLTAVTNVLIFFWCLAFLWGLLILLKYRWRK

SEQ ID NO: 34227 - protein, 42 aa, Artificial Sequence
  Quasi-synthetic sequence derived from human genome
CGKYLKVFYKFINLNRYKIRHTRKKPFKCKNCVKSFCMFSHK

SEQ ID NO: 34228 - protein, 42 aa, Artificial Sequence
  Quasi-synthetic sequence derived from human genome
LLRDLPTLKAAVIVAFAFTTLLIACLLLRVFRSGKRLKKTRK

SEQ ID NO: 34229 - protein, 42 aa, Artificial Sequence
  Quasi-synthetic sequence derived from human genome
RRRSRSVVRRRSFSISPVRLRRSRTPLRRRFSRSPIRRKRSR

SEQ ID NO: 34230 - protein, 42 aa, Artificial Sequence
  Quasi-synthetic sequence derived from human genome
FSRSKKKKKKKKKRQCFAFLIYFRLGIKMGKQGIINKEGYLY

SEQ ID NO: 34231 - protein, 42 aa, Artificial Sequence
  Quasi-synthetic sequence derived from human genome
RFSCTQIWVKMYGYFAGLCRRLQKFWRVTVKGFFVKKKEKKI

SEQ ID NO: 34232 - protein, 42 aa, Artificial Sequence
  Quasi-synthetic sequence derived from human genome
IWVPVKVILHKKRYIYRKIKGWRPVLMMCVVLTTLPCLTFSI

SEQ ID NO: 34233 - protein, 42 aa, Artificial Sequence
  Quasi-synthetic sequence derived from human genome
KLFTLVSACIPVFRLARRRKKILFYCHFPDLLLTKRDSFLKR

SEQ ID NO: 34234 - protein, 42 aa, Artificial Sequence
  Quasi-synthetic sequence derived from human genome
KLLKRLRLLPALLILRAFKPHRKIRDYRVVVVGTAGVGKSTL

SEQ ID NO: 34235 - protein, 42 aa, Artificial Sequence
  Quasi-synthetic sequence derived from human genome
LKIVILGLVLPLLVMVICYSGILKTLLRCRNEKKRHRAVRLI

SEQ ID NO: 34236 - protein, 42 aa, Artificial Sequence
  Quasi-synthetic sequence derived from human genome
CAVRAMLYSRAVRNLKKKLLPWQRRGLLRAQGLRGWKARRAT

SEQ ID NO: 34237 - protein, 42 aa, Artificial Sequence
  Quasi-synthetic sequence derived from human genome
KVLRGYRYRKEFLRQRRAAVTLQAWWRGYCNRRNFKLILVGF

SEQ ID NO: 34238 - protein, 42 aa, Artificial Sequence
  Quasi-synthetic sequence derived from human genome
LLFARGAPAWLRRRYLRLRYEDLVRQPRAQLRRLLRFSGLRA

SEQ ID NO: 34239 - protein, 42 aa, Artificial Sequence
  Quasi-synthetic sequence derived from human genome
LKLVKGILPLVGMAMVPALLGLIGYHLYRKANRPKVSKKKLK

SEQ ID NO: 34240 - protein, 42 aa, Artificial Sequence
  Quasi-synthetic sequence derived from human genome
ARKHLNKLRNIRYGFNTILVILIWRIFIARSQMARNIWYFVV

SEQ ID NO: 34241 - protein, 42 aa, Artificial Sequence
  Quasi-synthetic sequence derived from human genome
RRKMPSLGWLRKCYQQIDRRLRKNLKSLIIVHPSWFIRTLLA

SEQ ID NO: 34242 - protein, 42 aa, Artificial Sequence
  Quasi-synthetic sequence derived from human genome
LKAKKAQLMQYLSLPKTPKMLKMSKGLDARSKRWLKIIWRRH

SEQ ID NO: 34243 - protein, 42 aa, Artificial Sequence
  Quasi-synthetic sequence derived from human genome
HKCKQRFTKITQYLIRIRKLTLKRQRKLVPLSKKVERREKRR

SEQ ID NO: 34244 - protein, 42 aa, Artificial Sequence
  Quasi-synthetic sequence derived from human genome
KAAINLAKLKLFRHYYVLIVCYIYFTRIIAFLLKLAVPFQWK

SEQ ID NO: 34245 - protein, 42 aa, Artificial Sequence
  Quasi-synthetic sequence derived from human genome
MFYLLRIANFSNLIFLRIKRRVKSVVLVILLGPLLFLVCHLF

SEQ ID NO: 34246 - protein, 42 aa, Artificial Sequence
  Quasi-synthetic sequence derived from human genome
PLLVMAICYTGIIKTLLRCPSKKKYKAIRLIFVIMAVFFIFW

SEQ ID NO: 34247 - protein, 42 aa, Artificial Sequence
  Quasi-synthetic sequence derived from human genome
LMMYEKLSMIRFRYRILRSQHFRTKSKVCKLRKAQRSWVQKV

SEQ ID NO: 34248 - protein, 42 aa, Artificial Sequence
  Quasi-synthetic sequence derived from human genome
LSPSKIKTFLSLVWKRRILFFVVTLVSVFLVWKFTYAHKYLL

SEQ ID NO: 34249 - protein, 42 aa, Artificial Sequence
  Quasi-synthetic sequence derived from human genome
ILLWYPVPCTRLPIRMAKALGKRTAKYRWFAVLYLLVCFLLL

SEQ ID NO: 34250 - protein, 42 aa, Artificial Sequence
  Quasi-synthetic sequence derived from human genome
LKKKLFKRRRVLNRERRLRHRVVGAVIDQGLITRHHLKKRAS

SEQ ID NO: 34251 - protein, 42 aa, Artificial Sequence
  Quasi-synthetic sequence derived from human genome
RYLRVKLTVRYKRVTTHRRIWLALGLCWLVSFLVGLTPMFGW

SEQ ID NO: 34252 - protein, 42 aa, Artificial Sequence
  Quasi-synthetic sequence derived from human genome
ERARPGAWRRDIFGRIIWHKFKQWVIPWHLNKRYNRKRFFAL

SEQ ID NO: 34253 - protein, 42 aa, Artificial Sequence
  Quasi-synthetic sequence derived from human genome
RLFRAARLIKLLRQGYTIRILLWTFVQSFKALPYVCLLIAML

SEQ ID NO: 34254 - protein, 42 aa, Artificial Sequence
  Quasi-synthetic sequence derived from human genome
FRIQEVLKHARHFRGRKNRCYRLAVRTVIRAFVKCTKARYLK

SEQ ID NO: 34255 - protein, 42 aa, Artificial Sequence
  Quasi-synthetic sequence derived from human genome
LYRFLARRTNSTFNQVVLKRLFMSRTNRPPLSLSRMIRKMKL

SEQ ID NO: 34256 - protein, 42 aa, Artificial Sequence
  Quasi-synthetic sequence derived from human genome
LRIIRLVRVFRIFKLSRHSKGLQILGQTLKASMRELGLLIFF

SEQ ID NO: 34257 - protein, 42 aa, Artificial Sequence
  Quasi-synthetic sequence derived from human genome
RYKFYLPPTFTLTLLVPCVVILAKALFLLPCISRRLARIRRG

SEQ ID NO: 34258 - protein, 42 aa, Artificial Sequence
  Quasi-synthetic sequence derived from human genome
VANHFSRLKIHFTKVFSAFALVRTIRYLYRRLQRMLGLRRGS

SEQ ID NO: 34259 - protein, 42 aa, Artificial Sequence
  Quasi-synthetic sequence derived from human genome
KRLFVIRPSRFYDRRFLKLLRFYIALTGIPVAIFITLVNVFI

SEQ ID NO: 34260 - protein, 42 aa, Artificial Sequence
  Quasi-synthetic sequence derived from human genome
RLAFQGWLRRGVLLVRAPPACLQVLRDAWRRRALRPPRGFRI

SEQ ID NO: 34261 - protein, 42 aa, Artificial Sequence
  Quasi-synthetic sequence derived from human genome
FQGLSLLLLLLTFVLPLVVTLFCYCRISRRLRRPPHVGRARR

SEQ ID NO: 34262 - protein, 42 aa, Artificial Sequence
  Quasi-synthetic sequence derived from human genome
WRAAVPIGLLVCLCLLQAFGYRLRRVIAAFYFPKREKKRILF

SEQ ID NO: 34263 - protein, 42 aa, Artificial Sequence
  Quasi-synthetic sequence derived from human genome
KKLVPVRRRAWGQLCLPPQRLRVTRHPLIPAPVLGLLLLLLL

SEQ ID NO: 34264 - protein, 42 aa, Artificial Sequence
  Quasi-synthetic sequence derived from human genome
TSIKSFFRQLNLYGFRKRRQCTFRTFTRIFSAKRLVSILNKL

SEQ ID NO: 34265 - protein, 42 aa, Artificial Sequence
  Quasi-synthetic sequence derived from human genome
VKIQAWWRGTLVRRTLLHAALRAWIIQCWWRMTLSRVLEKKR

SEQ ID NO: 34266 - protein, 42 aa, Artificial Sequence
  Quasi-synthetic sequence derived from human genome
LLSLKKNKIHSLPDKVFIKYTKLKKIFLQHNCIRHISRKAFF

SEQ ID NO: 34267 - protein, 42 aa, Artificial Sequence
  Quasi-synthetic sequence derived from human genome
AHLGVFPSKAERKITSRPFTRFRTAVRVVIAILRLRFLVKKW

SEQ ID NO: 34268 - protein, 42 aa, Artificial Sequence
  Quasi-synthetic sequence derived from human genome
IFYLLKIANFSNLIFLRLKRRVKSVILVVLLGPLLFLACHLF

SEQ ID NO: 34269 - protein, 42 aa, Artificial Sequence
  Quasi-synthetic sequence derived from human genome
LIPFLIIVGICLILIVIFMITKFVQDRHRARRNRLRKDQLKK

SEQ ID NO: 34270 - protein, 42 aa, Artificial Sequence
  Quasi-synthetic sequence derived from human genome
LKLHRVLKVFLSRTAQRIPYMTGGRVMRMLAVILLVVFWFLI

SEQ ID NO: 34271 - protein, 42 aa, Artificial Sequence
  Quasi-synthetic sequence derived from human genome
LKHLCRLKIRKCMGRLHLRCPVFMSFLPLPNRLKAYVLYKEY

SEQ ID NO: 34272 - protein, 42 aa, Artificial Sequence
  Quasi-synthetic sequence derived from human genome
LFLLILLTGVLCHRFHGLWYMKMMWAWLQAKRKPRKAPSRNI

SEQ ID NO: 34273 - protein, 42 aa, Artificial Sequence
  Quasi-synthetic sequence derived from human genome
GRRSLRPCSVLVSLLQKPRHRCRKRKPLLAIGFYLYRMNKYH

SEQ ID NO: 34274 - protein, 42 aa, Artificial Sequence
  Quasi-synthetic sequence derived from human genome
KIFKCYFKHTLQQKVFILFLTLWLLSLLKLLNVRRLFPQKDI

SEQ ID NO: 34275 - protein, 42 aa, Artificial Sequence
  Quasi-synthetic sequence derived from human genome
LLTWKLILTFFKAASSQLRALYSMYLRKTKSLNKLLYHLFRL

SEQ ID NO: 34276 - protein, 42 aa, Artificial Sequence
  Quasi-synthetic sequence derived from human genome
VLLFSKLVLKLPWTQVGFSLLFLYLGSGGWRFIRVFIKTIRR

SEQ ID NO: 34277 - protein, 42 aa, Artificial Sequence
  Quasi-synthetic sequence derived from human genome
LYWKAQRYRLIREFHSRPALAPPFIVISHLRLLLRQLCRRPR

SEQ ID NO: 34278 - protein, 42 aa, Artificial Sequence
  Quasi-synthetic sequence derived from human genome
VLYTDLLRRLRAVRLRSGAKALGKARRKVTVLVLVVLAVCLL

SEQ ID NO: 34279 - protein, 42 aa, Artificial Sequence
  Quasi-synthetic sequence derived from human genome
MRYLRASSNRNFLLTMRPFLKRAILVLSYVLVILYFRLWIMG

SEQ ID NO: 34280 - protein, 42 aa, Artificial Sequence
  Quasi-synthetic sequence derived from human genome
RRELSLGRKKAPHRLCGRFSRISMKLPRIPLRRQKLPKVVVA

SEQ ID NO: 34281 - protein, 42 aa, Artificial Sequence
  Quasi-synthetic sequence derived from human genome
KLYWWRFLSMWGMFSVITSYILFRATRKPLSGRTPRLVYKWF

SEQ ID NO: 34282 - protein, 42 aa, Artificial Sequence
  Quasi-synthetic sequence derived from human genome
TLGLLVAGVLVLLVSLGVAIHLCCRRRRARLRFMKQLRLHPL

SEQ ID NO: 34283 - protein, 42 aa, Artificial Sequence
  Quasi-synthetic sequence derived from human genome
KPIPVMLLGVTLLKKKYPLAKYLCVLLIVAGVALFMYKPKKV

SEQ ID NO: 34284 - protein, 42 aa, Artificial Sequence
  Quasi-synthetic sequence derived from human genome
RIHFRFPNRPFVPSRCNHRFPFQPFYWPHRYLTYRYFPRRRL

SEQ ID NO: 34285 - protein, 42 aa, Artificial Sequence
  Quasi-synthetic sequence derived from human genome
ALTSTALLFLLFFLTLRFSVVKRGRKKLLYIFKQPFMRPVQT

SEQ ID NO: 34286 - protein, 42 aa, Artificial Sequence
  Quasi-synthetic sequence derived from human genome
KGKKCIVLVTELMTSGTLKTYLKRFKVMKIKVLRSWCRQILK

SEQ ID NO: 34287 - protein, 42 aa, Artificial Sequence
  Quasi-synthetic sequence derived from human genome
LVILLVIYVSWKRYPASMKQLQQRSLMRRHRKKKRQSLKQMT

SEQ ID NO: 34288 - protein, 42 aa, Artificial Sequence
  Quasi-synthetic sequence derived from human genome
LLCLFCLKLFKTAIPYMNHCWRHSRRRVLQCSKCRLQFLTLK

SEQ ID NO: 34289 - protein, 42 aa, Artificial Sequence
  Quasi-synthetic sequence derived from human genome
RRMFHATVATQTQFFHVKVLNINLKRKFIKKRIIIISNYSKR

SEQ ID NO: 34290 - protein, 42 aa, Artificial Sequence
  Quasi-synthetic sequence derived from human genome
VFLLAILGGMAFILLVLLCLLLYYCRRKCLKPRQHHRKLQLP

SEQ ID NO: 34291 - protein, 42 aa, Artificial Sequence
  Quasi-synthetic sequence derived from human genome
KIIRTIFKRLKSFICPKLHMGFKSSLRSQLSKYTAKIVNIVL

SEQ ID NO: 34292 - protein, 42 aa, Artificial Sequence
  Quasi-synthetic sequence derived from human genome
LLVLALASYRRLCLRLRLADCLVPYSRALYRRRRAPQPRQIR

SEQ ID NO: 34293 - protein, 42 aa, Artificial Sequence
  Quasi-synthetic sequence derived from human genome
RAYLVRKAFRHRLWAVLTVQAYARGMIARRLHQRLRAEYLWR

SEQ ID NO: 34294 - protein, 42 aa, Artificial Sequence
  Quasi-synthetic sequence derived from human genome
RKAPLWLRAKFQRLLFKLGCYIQKNCGKFLVVGLLIFGAFAV

SEQ ID NO: 34295 - protein, 42 aa, Artificial Sequence
  Quasi-synthetic sequence derived from human genome
ARLGLPARPWPRWLGVAALGLAAVALGTVAWRRAWPRRRRRL

SEQ ID NO: 34296 - protein, 42 aa, Artificial Sequence
  Quasi-synthetic sequence derived from human genome
RMRGFQARKRYLRRRAALGQLNTILLVAQPLLQRRQRLQLGR

SEQ ID NO: 34297 - protein, 42 aa, Artificial Sequence
  Quasi-synthetic sequence derived from human genome
LRVIRLVRVFRIFKLSRHSKGLQILGQTLKASMRELGLLIFF

SEQ ID NO: 34298 - protein, 42 aa, Artificial Sequence
  Quasi-synthetic sequence derived from human genome
LKIKLAVRMDKPQNMKHSGYLWAIGKNVWKRWKKRFFVLVQV

SEQ ID NO: 34299 - protein, 42 aa, Artificial Sequence
  Quasi-synthetic sequence derived from human genome
LVKPKIVKKRTKKFIRHQSDRYVKIKRNWRKPRGIDNRVRRR

SEQ ID NO: 34300 - protein, 42 aa, Artificial Sequence
  Quasi-synthetic sequence derived from human genome
FLFLLSATFNASFLLKLQKWTQKKEKGKKLSRMKLLLKHLTL

SEQ ID NO: 34301 - protein, 42 aa, Artificial Sequence
  Quasi-synthetic sequence derived from human genome
LAKLKLFRHYYVLIVCYIYFTRIIAFLLKLAVPFQWKWLYQL

SEQ ID NO: 34302 - protein, 42 aa, Artificial Sequence
  Quasi-synthetic sequence derived from human genome
KVAARMVWRLLHGQVLTRRERRRLLRTCVDFFRLVPFMVFLI

SEQ ID NO: 34303 - protein, 42 aa, Artificial Sequence
  Quasi-synthetic sequence derived from human genome
MPTPLLPLLLRLLLSCLLLPAARLARQYLLPLLRRLARRLGS

SEQ ID NO: 34304 - protein, 42 aa, Artificial Sequence
  Quasi-synthetic sequence derived from human genome
YRYKKNLKALYVVHPTSFIKVLWNILKPLISHKFGKKVIYFN

SEQ ID NO: 34305 - protein, 42 aa, Artificial Sequence
  Quasi-synthetic sequence derived from human genome
RKQIKRKAPRGFLKRVFKRKKPQLRLEKSGDLLVRFHPFSGW

SEQ ID NO: 34306 - protein, 42 aa, Artificial Sequence
  Quasi-synthetic sequence derived from human genome
KLYACKKLNKKRLKKRKGYQGAMVEKKILMKVHSRFIVSLAY

SEQ ID NO: 34307 - protein, 42 aa, Artificial Sequence
  Quasi-synthetic sequence derived from human genome
FAVRSGLLTVMVWVSSIFFFLPVFCLTVLYSLIGRKLWRRRR

SEQ ID NO: 34308 - protein, 42 aa, Artificial Sequence
  Quasi-synthetic sequence derived from human genome
RIQFFLQMAVYRRRFVQQKRAAITLQHYFRTWQTRKQFLLYR

SEQ ID NO: 34309 - protein, 42 aa, Artificial Sequence
  Quasi-synthetic sequence derived from human genome
ANPWNTIALLCGAFLALFKAAEFAKLSIKWMIKIRKRYLKRR

SEQ ID NO: 34310 - protein, 42 aa, Artificial Sequence
  Quasi-synthetic sequence derived from human genome
RATLKNLRKQYRNVKKMTAKELVKVLFSFFWMLFVGLFQLLF

SEQ ID NO: 34311 - protein, 42 aa, Artificial Sequence
  Quasi-synthetic sequence derived from human genome
AKMKKKTFKGLIRIFRKGVIAVLAANRLKILGQSCASLFTWM

SEQ ID NO: 34312 - protein, 42 aa, Artificial Sequence
  Quasi-synthetic sequence derived from human genome
LLWKRLLIARRSRKGFFAQIVLPAVFVCIALVFSLIVPPFGK

SEQ ID NO: 34313 - protein, 42 aa, Artificial Sequence
  Quasi-synthetic sequence derived from human genome
LARKAFAKKQQQLSALKVLQRNCAAYLKLRHWQWWRVFTKVK

SEQ ID NO: 34314 - protein, 42 aa, Artificial Sequence
  Quasi-synthetic sequence derived from human genome
VRLLRLIILIRIFHLLHQKRQLEKLMRRLVSENKRRYTRDGF

SEQ ID NO: 34315 - protein, 42 aa, Artificial Sequence
  Quasi-synthetic sequence derived from human genome
LRKSLKIIYLNSIQQLEIRNMSWPRLIRKLRCYLKEMKNLRK

SEQ ID NO: 34316 - protein, 42 aa, Artificial Sequence
  Quasi-synthetic sequence derived from human genome
KYQKILWKVPSFLITQVRRMNEATMLLKKQLPSVRKLLRRKT

SEQ ID NO: 34317 - protein, 42 aa, Artificial Sequence
  Quasi-synthetic sequence derived from human genome
LVKRLHKVLRPFLLRRVKVDVEKQMPKKYEHVIRCRLSKRQR

SEQ ID NO: 34318 - protein, 42 aa, Artificial Sequence
  Quasi-synthetic sequence derived from human genome
LFALLSRGRRRRMHVLRRRWDLGSLCRALLTRGLAALGHSLK

SEQ ID NO: 34319 - protein, 42 aa, Artificial Sequence
  Quasi-synthetic sequence derived from human genome
FFNKDLRRNKAALLFWHILLLGPIVRCLHTIRNYHKWLKNLK

SEQ ID NO: 34320 - protein, 42 aa, Artificial Sequence
  Quasi-synthetic sequence derived from human genome
IVSYLFAKSNTVYNPVIYVFMIRKFRRSLLQLLCLRLLRCQR

SEQ ID NO: 34321 - protein, 42 aa, Artificial Sequence
  Quasi-synthetic sequence derived from human genome
LGLTGLYGFIFYLLASVLLSLLLILKAGRRWNKYFKSRRPLF

SEQ ID NO: 34322 - protein, 42 aa, Artificial Sequence
  Quasi-synthetic sequence derived from human genome
FVAGLLLGKGCRYFRYILKQDHQILGKKIKRMKRSVKKYSIV

SEQ ID NO: 34323 - protein, 42 aa, Artificial Sequence
  Quasi-synthetic sequence derived from human genome
PLTSIISAVVGILLVVVLGVVFGILIKRRQQKIRKYTMRRLL

SEQ ID NO: 34324 - protein, 42 aa, Artificial Sequence
  Quasi-synthetic sequence derived from human genome
RTFRLLRVLKLVRFMPALRRQLVVLMKTMDNVATFCMLLMLF

SEQ ID NO: 34325 - protein, 42 aa, Artificial Sequence
  Quasi-synthetic sequence derived from human genome
KECNFFLIAVRLASLNQILDPWVYLLLRKILLRKFCQMRKRR

SEQ ID NO: 34326 - protein, 42 aa, Artificial Sequence
  Quasi-synthetic sequence derived from human genome
RWLLRTKRLHWSRLLFLLGMLIIGSTYQHLRRPRGLSSLWAA

SEQ ID NO: 34327 - protein, 42 aa, Artificial Sequence
  Quasi-synthetic sequence derived from human genome
LLLKKLKAWNDIKKVYASQRMRAGKGKMRNRRRIQRRGPCII

SEQ ID NO: 34328 - protein, 42 aa, Artificial Sequence
  Quasi-synthetic sequence derived from human genome
RIGRILRLVRAARGIRTLLFALMMSLPSLFNIGLLLFLIMFI

SEQ ID NO: 34329 - protein, 42 aa, Artificial Sequence
  Quasi-synthetic sequence derived from human genome
KIQDYHILTRKRIRYRFRRFIQQFSQCKATARNLKLKYLINL

SEQ ID NO: 34330 - protein, 42 aa, Artificial Sequence
  Quasi-synthetic sequence derived from human genome
IDYRHFVPQMPFVPAVAKSIPRKRISLKRPKKCFRNLFHIRR

SEQ ID NO: 34331 - protein, 42 aa, Artificial Sequence
  Quasi-synthetic sequence derived from human genome
LARKAFAKRQQQLTAMKVLQRNCAAYLKLRNWQWWRLFTKVK

SEQ ID NO: 34332 - protein, 42 aa, Artificial Sequence
  Quasi-synthetic sequence derived from human genome
ILFLTCISVHRCLGVLRPLRSLRWGRARYARRVAGAVWVLVL

SEQ ID NO: 34333 - protein, 42 aa, Artificial Sequence
  Quasi-synthetic sequence derived from human genome
RRRRRLRRRPRGLRCSRLPPPPPLPLLLGLLLAAAGPGAARA

SEQ ID NO: 34334 - protein, 42 aa, Artificial Sequence
  Quasi-synthetic sequence derived from human genome
VNFFIFLKILKLLISKLKAHQMCFRDYKYRLAKSTLVLIPLL

SEQ ID NO: 34335 - protein, 42 aa, Artificial Sequence
  Quasi-synthetic sequence derived from human genome
RKVSKIQRFHARSLWTNHKRYGYKKHSYRLVKKLKLQKMKKN

SEQ ID NO: 34336 - protein, 42 aa, Artificial Sequence
  Quasi-synthetic sequence derived from human genome
FFAFVLLLSGALAYCLALQLYVRRRKKLPSVLLFKKPSPFIF

SEQ ID NO: 34337 - protein, 42 aa, Artificial Sequence
  Quasi-synthetic sequence derived from human genome
LRLRKNTVKFSLYRHFKNTLIFAVLASIVFMGWTTKTFRIAK

SEQ ID NO: 34338 - protein, 42 aa, Artificial Sequence
  Quasi-synthetic sequence derived from human genome
SACIPVFRLARRRKKILFYCHFPDLLLTKRDSFLKRLYRAPI

SEQ ID NO: 34339 - protein, 42 aa, Artificial Sequence
  Quasi-synthetic sequence derived from human genome
LMTQMRMGKKKRAMKGKKPSFMVIRFPGRRGYGRLRPRARSL

SEQ ID NO: 34340 - protein, 42 aa, Artificial Sequence
  Quasi-synthetic sequence derived from human genome
RRTRSGVGWKRVLRSLCHSRTRVPLLAAIYFLMIHVLLILCF

SEQ ID NO: 34341 - protein, 42 aa, Artificial Sequence
  Quasi-synthetic sequence derived from human genome
YRRRCCRLCIWLLQTLVHLLQLGQVWRYLRALYLGLQSRWRG

SEQ ID NO: 34342 - protein, 42 aa, Artificial Sequence
  Quasi-synthetic sequence derived from human genome
KRALKVKQAMLQLYVLKLLKLQTKYLGRQWRKSNMKTMSAIY

SEQ ID NO: 34343 - protein, 42 aa, Artificial Sequence
  Quasi-synthetic sequence derived from human genome
RLAQARGAAKKAGLLMALARLCFLLGRLCSRRLKLSQARVYF

SEQ ID NO: 34344 - protein, 42 aa, Artificial Sequence
  Quasi-synthetic sequence derived from human genome
ARLRPRLHFCLVLLLLLVVPAAWGCGPGRVVGSRRRPPRKLV

SEQ ID NO: 34345 - protein, 42 aa, Artificial Sequence
  Quasi-synthetic sequence derived from human genome
ISSWFRGNMQKKCYGKIKASVLLIQAFVRGWKARKNYRKYFR

SEQ ID NO: 34346 - protein, 42 aa, Artificial Sequence
  Quasi-synthetic sequence derived from human genome
LLIMVICYSGILKTLLRCRNEKKRHRAVRVIFTIMIVYFLFW

SEQ ID NO: 34347 - protein, 42 aa, Artificial Sequence
  Quasi-synthetic sequence derived from human genome
YIFVAIFWIVFLLLIVFYTAITKKIFKSHLKSSRNSTSVKKK

SEQ ID NO: 34348 - protein, 42 aa, Artificial Sequence
  Quasi-synthetic sequence derived from human genome
KRRMSVGQQTWALLCKNCLKKWRMKRQTLLEWLFSFLLVLFL

SEQ ID NO: 34349 - protein, 42 aa, Artificial Sequence
  Quasi-synthetic sequence derived from human genome
PPFRLIRKMFSFKVSRWMGLACFRSLAASSPSIRQKKLMHKL

SEQ ID NO: 34350 - protein, 42 aa, Artificial Sequence
  Quasi-synthetic sequence derived from human genome
ILKLYRVLQLFLSRTAQRSALLSSGRLLRRLGLLLLPVLGFL

SEQ ID NO: 34351 - protein, 42 aa, Artificial Sequence
  Quasi-synthetic sequence derived from human genome
LARKAFAKRQQQLTAMKVIQRNCAAYLKLRNWQWWRLFTKVK

SEQ ID NO: 34352 - protein, 42 aa, Artificial Sequence
  Quasi-synthetic sequence derived from human genome
RPRRRFLCHLSRQQLRMAMRIPVLYEQLKREKLRVHKARQWK

SEQ ID NO: 34353 - protein, 42 aa, Artificial Sequence
  Quasi-synthetic sequence derived from human genome
IPWKVLKVVAKVIRALLRILCCLLKAICRVLSIPVRVLVDVA

SEQ ID NO: 34354 - protein, 42 aa, Artificial Sequence
  Quasi-synthetic sequence derived from human genome
RKVRRKEPKSQDIYLRLLVKLYRFLARRTNSTFNQVVLKRLF

SEQ ID NO: 34355 - protein, 42 aa, Artificial Sequence
  Quasi-synthetic sequence derived from human genome
PSHRRKIFPGLILSDIKPAKRMKFKTVCYLLVQLMHCRKMFK

SEQ ID NO: 34356 - protein, 42 aa, Artificial Sequence
  Quasi-synthetic sequence derived from human genome
KLRLDKLRQSCVMVQKHMRGWLQRKKFLRERRAALIIQQYFR

SEQ ID NO: 34357 - protein, 42 aa, Artificial Sequence
  Quasi-synthetic sequence derived from human genome
VLQNLRTAMRRQMRRHASRRGPSRRRLGRLWNRLFHRPRAPR

SEQ ID NO: 34358 - protein, 42 aa, Artificial Sequence
  Quasi-synthetic sequence derived from human genome
LHVVLSSKVCRGYLVKMGGKIKSWKKRWFVFDRLKRTLSYYV

SEQ ID NO: 34359 - protein, 42 aa, Artificial Sequence
  Quasi-synthetic sequence derived from human genome
LVRFQDRMYQKDPVKAKTKRRLVLGLREVLKHLKLKKLKCVI

SEQ ID NO: 34360 - protein, 42 aa, Artificial Sequence
  Quasi-synthetic sequence derived from human genome
RASAVGLLGTLVRRGRGGLRLGLRGPLRKLVLQSLVPLLLRL

SEQ ID NO: 34361 - protein, 42 aa, Artificial Sequence
  Quasi-synthetic sequence derived from human genome
MKVKKLPMILALHLKRFKYMDQLHRYTKLSYRVVFPLELRLF

SEQ ID NO: 34362 - protein, 42 aa, Artificial Sequence
  Quasi-synthetic sequence derived from human genome
FYRNKLKYLAFLRKRMNTNPSRGPYHFRAPSRIFWRTVRGML

SEQ ID NO: 34363 - protein, 42 aa, Artificial Sequence
  Quasi-synthetic sequence derived from human genome
LKFHIRRFIFLFFILVIGIYPSGHSLILILGNPKLKQNAKKF

SEQ ID NO: 34364 - protein, 42 aa, Artificial Sequence
  Quasi-synthetic sequence derived from human genome
IFYTLVIPLLNPFIYSLRNKEVINIMKKIMKKRKFCHILKQM

SEQ ID NO: 34365 - protein, 42 aa, Artificial Sequence
  Quasi-synthetic sequence derived from human genome
LQWRRRHCCFAKMTWNAKRSLFRTHLIGVLSLVFLFAMFLFF

SEQ ID NO: 34366 - protein, 42 aa, Artificial Sequence
  Quasi-synthetic sequence derived from human genome
FMFCKAIRFSYPSIHPFILIWGNKKLKQTFLSVLRQVRYWVK

SEQ ID NO: 34367 - protein, 42 aa, Artificial Sequence
  Quasi-synthetic sequence derived from human genome
RRKSNPKPLVLSEARKQLMIYRLPQVLRLHLKRFRWSGRNHR

SEQ ID NO: 34368 - protein, 42 aa, Artificial Sequence
  Quasi-synthetic sequence derived from human genome
KKRAPKVLGTTLVVGLLAGVGYFAFMLFRKRLGSMILAFRPR

SEQ ID NO: 34369 - protein, 42 aa, Artificial Sequence
  Quasi-synthetic sequence derived from human genome
RVLFYLGPVYLAGYLGLSITWLLLGALLWMWWRRNRRGKLGR

SEQ ID NO: 34370 - protein, 42 aa, Artificial Sequence
  Quasi-synthetic sequence derived from human genome
KLCSRFLLKCGFITIPWRCIKKCSPLMPRAAVPRFVQQKLYL

SEQ ID NO: 34371 - protein, 42 aa, Artificial Sequence
  Quasi-synthetic sequence derived from human genome
GRLKHRGSSLHPFRKGLQEKDKVWLLREQKRKKKLRKLLKRL

SEQ ID NO: 34372 - protein, 42 aa, Artificial Sequence
  Quasi-synthetic sequence derived from human genome
LKLNLFGLVLPLLVMIICYTGIIKILLRRPNEKKSKAVRLIF

SEQ ID NO: 34373 - protein, 42 aa, Artificial Sequence
  Quasi-synthetic sequence derived from human genome
RLLGPKLRRFLKPQGHPRLLLWFKRGLALAAFLGLVLWLSLD

SEQ ID NO: 34374 - protein, 42 aa, Artificial Sequence
  Quasi-synthetic sequence derived from human genome
MRARRKTAKMLMVVLLVFALCYLPISVLNVLKRVFGMFRQAS

SEQ ID NO: 34375 - protein, 42 aa, Artificial Sequence
  Quasi-synthetic sequence derived from human genome
MKKFLYIKSVFHTLRMAQRRHKRVRTWTRHINIFNKDYIFVP

SEQ ID NO: 34376 - protein, 42 aa, Artificial Sequence
  Quasi-synthetic sequence derived from human genome
KIQLAVSHMGVLVFQGTTKINTFNWSKVRKLSFKRKRFLIKL

SEQ ID NO: 34377 - protein, 42 aa, Artificial Sequence
  Quasi-synthetic sequence derived from human genome
MAKPFFRLQKFLRRTQFLLFFLTAAYLMTGSLLLLQRVRVAL

SEQ ID NO: 34378 - protein, 42 aa, Artificial Sequence
  Quasi-synthetic sequence derived from human genome
RLRHPRTRWKNWWVRGILTLAMIAFFFIIIYLGPMVLMIIVM

SEQ ID NO: 34379 - protein, 42 aa, Artificial Sequence
  Quasi-synthetic sequence derived from human genome
KVALFAAVGAGCVIFLLIIIFLTVLLLKLRKRHRKHTQQRAA

SEQ ID NO: 34380 - protein, 42 aa, Artificial Sequence
  Quasi-synthetic sequence derived from human genome
LARPVLAGIVATICFLAAAILFSTLAACFVNKQRKRKLKRKK

SEQ ID NO: 34381 - protein, 42 aa, Artificial Sequence
  Quasi-synthetic sequence derived from human genome
KQRFLFAKLFSHITSARKARKYEIPHFRLKKVENIKIWLSLR

SEQ ID NO: 34382 - protein, 42 aa, Artificial Sequence
  Quasi-synthetic sequence derived from human genome
YTFPPLYYRRAHRRFVTKKALCIRVFQETQKLKKRRRALKAA

SEQ ID NO: 34383 - protein, 42 aa, Artificial Sequence
  Quasi-synthetic sequence derived from human genome
PARWSFRAYTSVLYFNPWMRIFIQAKRVKTKHLCYCLYRPRK

SEQ ID NO: 34384 - protein, 42 aa, Artificial Sequence
  Quasi-synthetic sequence derived from human genome
KKPRTFIIKLIKWLMIAIPATFVNSAIRYLECKLALAFRTRL

SEQ ID NO: 34385 - protein, 42 aa, Artificial Sequence
  Quasi-synthetic sequence derived from human genome
LQKLLKDGGVLSPILTRLMNFFVFSRGLLQYINQRKKFRRRW

SEQ ID NO: 34386 - protein, 42 aa, Artificial Sequence
  Quasi-synthetic sequence derived from human genome
IWIRTKPSDIIRKYISKYSVFLRHRYQSRSAFLGRYLKKKKS

SEQ ID NO: 34387 - protein, 42 aa, Artificial Sequence
  Quasi-synthetic sequence derived from human genome
PFLRKCFAISLLVICIIISIGIFYGFVANHQVRTRIKRSRKL

SEQ ID NO: 34388 - protein, 42 aa, Artificial Sequence
  Quasi-synthetic sequence derived from human genome
FKKIVERRDALLVIQWNIRAFMGVKNWPWMKLYFKIKPLLKS

SEQ ID NO: 34389 - protein, 42 aa, Artificial Sequence
  Quasi-synthetic sequence derived from human genome
WRFLRIVCKTARRDLFGLSVLIRVRLELRRHQRAGHTIPRIF

SEQ ID NO: 34390 - protein, 42 aa, Artificial Sequence
  Quasi-synthetic sequence derived from human genome
AVATLRFLKLRRERRALLCLLLVLGIAFIPIILEKIMYKVTR

SEQ ID NO: 34391 - protein, 42 aa, Artificial Sequence
  Quasi-synthetic sequence derived from human genome
LFYLSASINPILYNLISKKYRAAAFKLLLARKSRPRGFHRSR

SEQ ID NO: 34392 - protein, 42 aa, Artificial Sequence
  Quasi-synthetic sequence derived from human genome
RFLCGFLVPVLIITACYLTIVCKLQRNRLAKTKKPFKIIVTI

SEQ ID NO: 34393 - protein, 42 aa, Artificial Sequence
  Quasi-synthetic sequence derived from human genome
KLLKYYVLNALKHRPPKAQKKRYLFRSFKATKFFQSTKLDWV

SEQ ID NO: 34394 - protein, 42 aa, Artificial Sequence
  Quasi-synthetic sequence derived from human genome
RFLVIWILFSAVTAFVTFRATRKPLVQTTPRLVYKWFLLIYK

SEQ ID NO: 34395 - protein, 42 aa, Artificial Sequence
  Quasi-synthetic sequence derived from human genome
AKILGVLRVLRLLRTLRPLRVISRAPGLKLVVETLISSLRPI

SEQ ID NO: 34396 - protein, 42 aa, Artificial Sequence
  Quasi-synthetic sequence derived from human genome
RFKRSYNYKTIVKKILAKLKRARSKKLDNFQSEKKVFKKSFL

SEQ ID NO: 34397 - protein, 42 aa, Artificial Sequence
  Quasi-synthetic sequence derived from human genome
VVRVSLVWIFFFLLCVAERTYKQRLLFAKLFGHLTSARRARK

SEQ ID NO: 34398 - protein, 42 aa, Artificial Sequence
  Quasi-synthetic sequence derived from human genome
RRPRSAEVKYFYFFKILLRLRLAILKYLFIDDKGILFVSSRK

SEQ ID NO: 34399 - protein, 42 aa, Artificial Sequence
  Quasi-synthetic sequence derived from human genome
KLIRRRPFRQIQVLEPLNLLITISGHKNRLRVYHLTWLRNKI

SEQ ID NO: 34400 - protein, 42 aa, Artificial Sequence
  Quasi-synthetic sequence derived from human genome
RKTISGVALWRQQVCAIAKVRFLKLKKERKSLWTILLLFGIS

SEQ ID NO: 34401 - protein, 42 aa, Artificial Sequence
  Quasi-synthetic sequence derived from human genome
LRRAIVFTRQLVTYIVVGVTLRPAILVIPCLLLIKCHLKLYR

SEQ ID NO: 34402 - protein, 42 aa, Artificial Sequence
  Quasi-synthetic sequence derived from human genome
RPRRPRRRASRAFCPRPCALPGRPGLTLLCRPRCRRQPRLRL

SEQ ID NO: 34403 - protein, 42 aa, Artificial Sequence
  Quasi-synthetic sequence derived from human genome
LKIKLAVRMDKPAHMKHSGYLYALGQKVWKRWKKRYFVLVQV

SEQ ID NO: 34404 - protein, 42 aa, Artificial Sequence
  Quasi-synthetic sequence derived from human genome
RQQLQALLLKRFLLARRSRRGLFAQIVLPALFVGLALVFSLI

SEQ ID NO: 34405 - protein, 42 aa, Artificial Sequence
  Quasi-synthetic sequence derived from human genome
AFRALGVATQTAIAAAIALLALTALLLVAMICRRRRRRKKAR

SEQ ID NO: 34406 - protein, 42 aa, Artificial Sequence
  Quasi-synthetic sequence derived from human genome
FLKLKNAATLIQRHWRGHNCRKNYGLMRLGFLRLQALHRSRK

SEQ ID NO: 34407 - protein, 42 aa, Artificial Sequence
  Quasi-synthetic sequence derived from human genome
RSALFALRYNILTLMRMLSLKSLKKQMKKVKKMTVKDMVTAF

SEQ ID NO: 34408 - protein, 42 aa, Artificial Sequence
  Quasi-synthetic sequence derived from human genome
LIIGLRKTFWFFFQRHKLKGTSFLLGGVVIVLLRWPLLGMFL

SEQ ID NO: 34409 - protein, 42 aa, Artificial Sequence
  Quasi-synthetic sequence derived from human genome
KGKRCIVLVTELMTSGTLKTYLKRFKVMKPKVLRSWCRQILK

SEQ ID NO: 34410 - protein, 42 aa, Artificial Sequence
  Quasi-synthetic sequence derived from human genome
KYHRFLGRHFPRFYVLYTIFMKGLQMLWADAKKARRIKTNMW

SEQ ID NO: 34411 - protein, 42 aa, Artificial Sequence
  Quasi-synthetic sequence derived from human genome
WRLILSKILKKRRQAALEAFSRKEWAAVTLQSQARMWRIRRR

SEQ ID NO: 34412 - protein, 42 aa, Artificial Sequence
  Quasi-synthetic sequence derived from human genome
YHIKNYIMNKDLLRRVLVLMNSKHTFLALCALRFMRRIIGLK

SEQ ID NO: 34413 - protein, 42 aa, Artificial Sequence
  Quasi-synthetic sequence derived from human genome
RTIFLVLLFSQYARNVKFPLPIYKSKKGWTAYKLQLFKMFPI

SEQ ID NO: 34414 - protein, 42 aa, Artificial Sequence
  Quasi-synthetic sequence derived from human genome
LLVICLCYLLIVVKVRSAGRRVWAPSCQRRRRSERRVTRMVV

SEQ ID NO: 34415 - protein, 42 aa, Artificial Sequence
  Quasi-synthetic sequence derived from human genome
LWALSLLLGVARSLWMLLKLRQRLRSPTAPFTSPLPRGKRRA

SEQ ID NO: 34416 - protein, 42 aa, Artificial Sequence
  Quasi-synthetic sequence derived from human genome
RSNAPNIPKLNRFLLLFIGFVCVLLSFFMARVFMRMKLPRSL

SEQ ID NO: 34417 - protein, 42 aa, Artificial Sequence
  Quasi-synthetic sequence derived from human genome
AKLFGHLTSARRARKSEVPHFRLKKVQNIKMWLSLRSYLKRR

SEQ ID NO: 34418 - protein, 42 aa, Artificial Sequence
  Quasi-synthetic sequence derived from human genome
LLLVVVTWRVCQKSHCFRLGRQLSKALQVNCVVRKLLVQLRR

SEQ ID NO: 34419 - protein, 42 aa, Artificial Sequence
  Quasi-synthetic sequence derived from human genome
LLVVAVFCILWNWNKRKKRQVPYLRVTVMPLLTLPQTRQRAK

SEQ ID NO: 34420 - protein, 42 aa, Artificial Sequence
  Quasi-synthetic sequence derived from human genome
KVMLKSIKTRLGRRVPAAPPALRRNLLLQAWKCVCNWASRLF

SEQ ID NO: 34421 - protein, 42 aa, Artificial Sequence
  Quasi-synthetic sequence derived from human genome
LIQRKYRAHLCTKHHLQFLQVQNAVIKIQSSYRRWMIRKRMR

SEQ ID NO: 34422 - protein, 42 aa, Artificial Sequence
  Quasi-synthetic sequence derived from human genome
AKILGVLRVLRLLRTLRPLRVISRAPGLKLVVETLISSLKPI

SEQ ID NO: 34423 - protein, 42 aa, Artificial Sequence
  Quasi-synthetic sequence derived from human genome
RLWGRRKCKPQMNYDKLSRALRYYYNKRILHKTKGKRFTYKF

SEQ ID NO: 34424 - protein, 42 aa, Artificial Sequence
  Quasi-synthetic sequence derived from human genome
RIMRVLRIARVLKLLKMAVGMRALLDTVGNLGLLFMLLFFIF

SEQ ID NO: 34425 - protein, 42 aa, Artificial Sequence
  Quasi-synthetic sequence derived from human genome
LRQLALLLWKNYTLQKRKVLVTVLELFLPLLFSGILIWLRLK

SEQ ID NO: 34426 - protein, 42 aa, Artificial Sequence
  Quasi-synthetic sequence derived from human genome
TFKTCKEYLRPLKKFLRKLHLPRDLPQKKKLKYMKQSLVVLG

SEQ ID NO: 34427 - protein, 42 aa, Artificial Sequence
  Quasi-synthetic sequence derived from human genome
IQAGVRGYLARRRIRLWHRGAMVIQATWRGYRVRRNLAHLCR

SEQ ID NO: 34428 - protein, 42 aa, Artificial Sequence
  Quasi-synthetic sequence derived from human genome
RALHRLHQFQQLLWVLGLLVGLLLLLLGLGACYTWRRRRVCK

SEQ ID NO: 34429 - protein, 42 aa, Artificial Sequence
  Quasi-synthetic sequence derived from human genome
KKQRLSKKLRRKLQMWLWSQTFCPVLYAWNDLGSRFWPRYVK

SEQ ID NO: 34430 - protein, 42 aa, Artificial Sequence
  Quasi-synthetic sequence derived from human genome
NRFVQLSGRPHLPGKKKIRWDPVRRRFIQSCPIIRIPNRFLR

SEQ ID NO: 34431 - protein, 42 aa, Artificial Sequence
  Quasi-synthetic sequence derived from human genome
MWVLLRSGYPLRILLPLRGEWMGRRGLPRNLAPGPPRRRYRK

SEQ ID NO: 34432 - protein, 42 aa, Artificial Sequence
  Quasi-synthetic sequence derived from human genome
KSSWVKRHRSSFRNRFPLLKVLILQRNKLSDTPKGLWKLKSL

SEQ ID NO: 34433 - protein, 42 aa, Artificial Sequence
  Quasi-synthetic sequence derived from human genome
FRCILLRWARLLGFATVYGTVTLKLHRVLKVFLSRTAQRIPY

SEQ ID NO: 34434 - protein, 42 aa, Artificial Sequence
  Quasi-synthetic sequence derived from human genome
LWKNVTLKRRSPWVLAFEIFIPLVLFFILLGLRQKKPTISVK

SEQ ID NO: 34435 - protein, 42 aa, Artificial Sequence
  Quasi-synthetic sequence derived from human genome
RLARHDRGNYVRLNMKQKHYVRGRALRSRLLRKQAWKQKWRK

SEQ ID NO: 34436 - protein, 42 aa, Artificial Sequence
  Quasi-synthetic sequence derived from human genome
LIQAAIRSWLTRKHIQRLHAAATVIKRAWQKWRIRMACLAAK

SEQ ID NO: 34437 - protein, 42 aa, Artificial Sequence
  Quasi-synthetic sequence derived from human genome
WLLLVLVLVLLVSPRGCRARRGLRGLLMAHSQRLLFRIGYSL

SEQ ID NO: 34438 - protein, 42 aa, Artificial Sequence
  Quasi-synthetic sequence derived from human genome
SQIPKRKRKAKKRRKNDVVVVKGKLKLCSISGLIALCGILVL

SEQ ID NO: 34439 - protein, 42 aa, Artificial Sequence
  Quasi-synthetic sequence derived from human genome
PRAARPPLLLRPVKLLRRRFRLLLALAVVSVGLWTLYLELVA

SEQ ID NO: 34440 - protein, 42 aa, Artificial Sequence
  Quasi-synthetic sequence derived from human genome
LLIVGKMRAVALRAGWQQRRRSEKKITRLVLMVVVVFVLCWM

SEQ ID NO: 34441 - protein, 42 aa, Artificial Sequence
  Quasi-synthetic sequence derived from human genome
PSSFRNLRLPKRLRVVYFLARTRLAQRLIMAGTVVWIGILVY

SEQ ID NO: 34442 - protein, 42 aa, Artificial Sequence
  Quasi-synthetic sequence derived from human genome
KGKKCIVLVTELMTSGTLKTYLKRFKVMKPKVLRSWCRQILK

SEQ ID NO: 34443 - protein, 42 aa, Artificial Sequence
  Quasi-synthetic sequence derived from human genome
FKERLKLFFIKNQRSSLRIRLFNFSLKLLSCLLYIIRVLLEN

SEQ ID NO: 34444 - protein, 42 aa, Artificial Sequence
  Quasi-synthetic sequence derived from human genome
PGAKKSAKLYIPYIILTIIILTIVGFIWLLKVNGCRKYKLNK

SEQ ID NO: 34445 - protein, 42 aa, Artificial Sequence
  Quasi-synthetic sequence derived from human genome
RFPVFLAILINFFIFVRIVQLLVAKLRARQMHHTDYKFRLAK

SEQ ID NO: 34446 - protein, 42 aa, Artificial Sequence
  Quasi-synthetic sequence derived from human genome
VMRLRTKMPWKTCWRYLTSGGFFLLILMIFSKLLKHSVIVAI

SEQ ID NO: 34447 - protein, 42 aa, Artificial Sequence
  Quasi-synthetic sequence derived from human genome
RWHWQKKVINKGLFFLGSLIAISSTYLLIHYMSPRSFLRLRR

SEQ ID NO: 34448 - protein, 42 aa, Artificial Sequence
  Quasi-synthetic sequence derived from human genome
ILQRVLLLFRAAQCSFPVAQWYILQLRWARKVMQKIRMKGSL

SEQ ID NO: 34449 - protein, 42 aa, Artificial Sequence
  Quasi-synthetic sequence derived from human genome
LRMKIKEVKKENGDKKIVPKKKKPLKLGPIKKKDLKKLVLYL

SEQ ID NO: 34450 - protein, 42 aa, Artificial Sequence
  Quasi-synthetic sequence derived from human genome
YVYKIGIYGWRKRCLYLFVLLLLIILVVNLALTIWILKVMWF

SEQ ID NO: 34451 - protein, 42 aa, Artificial Sequence
  Quasi-synthetic sequence derived from human genome
LAPWPRPPPRRFSPPRRMLPPPPMWRRSPPRMRRRSRSPRRR

SEQ ID NO: 34452 - protein, 42 aa, Artificial Sequence
  Quasi-synthetic sequence derived from human genome
CHLKLKNLHKAIEDSSKAYRIMKRHLRLIHPTKLYKLMLRRF

SEQ ID NO: 34453 - protein, 42 aa, Artificial Sequence
  Quasi-synthetic sequence derived from human genome
LLKTVSYKACLPPSLRDLIQGLSFVTRRRIRRTVRRALRRVA

SEQ ID NO: 34454 - protein, 42 aa, Artificial Sequence
  Quasi-synthetic sequence derived from human genome
RYYRLAPMRLYTLSKRHFVLVFVVFFICFGLTIFVGIRGPKV

SEQ ID NO: 34455 - protein, 42 aa, Artificial Sequence
  Quasi-synthetic sequence derived from human genome
LQIRKLRHRLSNFPRLPGILAPETVLLPFCYKVFRKKEKVKR

SEQ ID NO: 34456 - protein, 42 aa, Artificial Sequence
  Quasi-synthetic sequence derived from human genome
HKPLREWFVIVIMATICFILLILSLICKIKLGPVRRKLKSSV

SEQ ID NO: 34457 - protein, 42 aa, Artificial Sequence
  Quasi-synthetic sequence derived from human genome
HRNGGPLIPKKFQLNQHRRIKLSPLMMYEKLSMIRFRYRILR

SEQ ID NO: 34458 - protein, 42 aa, Artificial Sequence
  Quasi-synthetic sequence derived from human genome
WDKWLKVYKSIYFLGHIFFLSLLFILPYIHKAMVPRKEKLKK

SEQ ID NO: 34459 - protein, 42 aa, Artificial Sequence
  Quasi-synthetic sequence derived from human genome
LLSVLAMFFLLVLILSSVFLFRLFKRRQGRIFPEGKMWKLTF

SEQ ID NO: 34460 - protein, 42 aa, Artificial Sequence
  Quasi-synthetic sequence derived from human genome
IRLVRVFRIFKLSRHSKGLQILGKTLQASMRELGLLIFFLFI

SEQ ID NO: 34461 - protein, 42 aa, Artificial Sequence
  Quasi-synthetic sequence derived from human genome
KKYRFHKTRSRMTHRTPKVKKSPKVRKKSYLSRLMLSNRLPF

SEQ ID NO: 34462 - protein, 42 aa, Artificial Sequence
  Quasi-synthetic sequence derived from human genome
VVTAVLILLVVRRLRVPKTPAPDGPRYRFRKRDKVLFYGRKI

SEQ ID NO: 34463 - protein, 42 aa, Artificial Sequence
  Quasi-synthetic sequence derived from human genome
KRKKKAWKRMVTKVCFVGDGFTRKPPKYERFIRPMGLRFKKA

SEQ ID NO: 34464 - protein, 42 aa, Artificial Sequence
  Quasi-synthetic sequence derived from human genome
IFLVLLFSQYARNVKFPLPIYKSKKGWTAYKLQLFKMFPIIL

SEQ ID NO: 34465 - protein, 42 aa, Artificial Sequence
  Quasi-synthetic sequence derived from human genome
LKVAAVGRRVRSYGKRRPARTILRAFLEKARQTPHKPFLLFR

SEQ ID NO: 34466 - protein, 42 aa, Artificial Sequence
  Quasi-synthetic sequence derived from human genome
VRKTVQRSVAKGSRRCKKRMFKFHQMKHIFEILDKMRCLRKR

SEQ ID NO: 34467 - protein, 42 aa, Artificial Sequence
  Quasi-synthetic sequence derived from human genome
LLIISSILGSVWLAYKTPKLLRTARGRRIKKCATQLCRRCKT

SEQ ID NO: 34468 - protein, 42 aa, Artificial Sequence
  Quasi-synthetic sequence derived from human genome
KKKLWKKTPARKKRLREFVFCNKTQSKLLDKMTTSFWKRRNW

SEQ ID NO: 34469 - protein, 42 aa, Artificial Sequence
  Quasi-synthetic sequence derived from human genome
LGRKLITKYNRRELTDKLLIFLALALFLATVLYIVKKRLFPF

SEQ ID NO: 34470 - protein, 42 aa, Artificial Sequence
  Quasi-synthetic sequence derived from human genome
RRLQTQVFKLGLAKSIHHARVLIRQRHIRVRKQVVNIPSFIV

SEQ ID NO: 34471 - protein, 42 aa, Artificial Sequence
  Quasi-synthetic sequence derived from human genome
RFKKGKIVLLFSLLCWVLFNLGIGFVKPATLRCVPKIRPTTH

SEQ ID NO: 34472 - protein, 42 aa, Artificial Sequence
  Quasi-synthetic sequence derived from human genome
LVGVLLLFVLLLVVRRRRREQRLKRLRDAKSLAEMLMSKNTR

SEQ ID NO: 34473 - protein, 42 aa, Artificial Sequence
  Quasi-synthetic sequence derived from human genome
KTFKIKQFLAKKQKQNRPIPQWIRMKTGNKIRYNSKRRHWKR

SEQ ID NO: 34474 - protein, 42 aa, Artificial Sequence
  Quasi-synthetic sequence derived from human genome
SGKHNKKLKKSIKIIFIVVAAFLVSWLPFNTFKFLAIVSGLR

SEQ ID NO: 34475 - protein, 42 aa, Artificial Sequence
  Quasi-synthetic sequence derived from human genome
RTLFRSRSKRRHRTVKLIFAIVVAYFLSWGPYNFTLFLQTLF

SEQ ID NO: 34476 - protein, 42 aa, Artificial Sequence
  Quasi-synthetic sequence derived from human genome
RPKRYFTIVIISSSLLLGLIVLLLISYVMWKAGFFKRQYKSI

SEQ ID NO: 34477 - protein, 42 aa, Artificial Sequence
  Quasi-synthetic sequence derived from human genome
WRMTLSRVLEKKRQAALIAYATRERAVIKLQSLVRMWRVRWR

SEQ ID NO: 34478 - protein, 42 aa, Artificial Sequence
  Quasi-synthetic sequence derived from human genome
KRRERAVAIVRLVLGFLWPLLTLTICYTFILLRTWSRRATRS

SEQ ID NO: 34479 - protein, 42 aa, Artificial Sequence
  Quasi-synthetic sequence derived from human genome
LRGLLMAHSQRLLFRIGYSLYTRTWLGYLFYRQQLRRARNRY

SEQ ID NO: 34480 - protein, 42 aa, Artificial Sequence
  Quasi-synthetic sequence derived from human genome
LLLILRGQTRHQVRKGVAVRARPWRKNLQEVFGKRWLLGLLV

SEQ ID NO: 34481 - protein, 42 aa, Artificial Sequence
  Quasi-synthetic sequence derived from human genome
RKIMRKVTTLPNTLVENTALPRQRARKRTKVLSLAKRILRFK

SEQ ID NO: 34482 - protein, 42 aa, Artificial Sequence
  Quasi-synthetic sequence derived from human genome
RTVRRTMNIVPRTKVKTIKMFLILNLLFLLSWLPFHVAQLWH

SEQ ID NO: 34483 - protein, 42 aa, Artificial Sequence
  Quasi-synthetic sequence derived from human genome
KFIRIFQLSNNIRSVVLRHCKKRQSHLRLTLKNNVFLFIDKL

SEQ ID NO: 34484 - protein, 42 aa, Artificial Sequence
  Quasi-synthetic sequence derived from human genome
HLLVLYKKGVYLSHTGGKMLFWVLGLLILCGFLWTRKGKLKI

SEQ ID NO: 34485 - protein, 42 aa, Artificial Sequence
  Quasi-synthetic sequence derived from human genome
FFLWLWTSFNTAFLALQSLRFGFGFRRGRSFLLRSWHHLMKR

SEQ ID NO: 34486 - protein, 42 aa, Artificial Sequence
  Quasi-synthetic sequence derived from human genome
MRVIQVWFQNRRSKERRMKQLSALGARRHAFFRSPRRMRPLV

SEQ ID NO: 34487 - protein, 42 aa, Artificial Sequence
  Quasi-synthetic sequence derived from human genome
AVRIKTSIFSLFRAPKLRMRVFGLCFVRFAITVPFYGLILNL

SEQ ID NO: 34488 - protein, 42 aa, Artificial Sequence
  Quasi-synthetic sequence derived from human genome
RGWLVRKRFLEQRAKIRLLHFTAAAYYHLNAVRIQRAYKLYL

SEQ ID NO: 34489 - protein, 42 aa, Artificial Sequence
  Quasi-synthetic sequence derived from human genome
KHWMLHFPRITYPLVHLANWLCGLNLFWICKTCFRCLKRLKM

SEQ ID NO: 34490 - protein, 42 aa, Artificial Sequence
  Quasi-synthetic sequence derived from human genome
RLKYFFMSPCDKFRAKGRKPCKLMLQVVKILVVTVQLILFGL

SEQ ID NO: 34491 - protein, 42 aa, Artificial Sequence
  Quasi-synthetic sequence derived from human genome
LFSKKFKLWLLNALEGVPALLQISKLKEVTLFVKRLRRKTYL

SEQ ID NO: 34492 - protein, 42 aa, Artificial Sequence
  Quasi-synthetic sequence derived from human genome
LKAKRKVVKMMIIVVMTFAICWLPYHIYFILTAIYQQLNRWK

SEQ ID NO: 34493 - protein, 42 aa, Artificial Sequence
  Quasi-synthetic sequence derived from human genome
VYLLLRKILLRKFCQMRKRRLREQFWRPASSGSGCQQIRCLM

SEQ ID NO: 34494 - protein, 42 aa, Artificial Sequence
  Quasi-synthetic sequence derived from human genome
LQNFLKITSTRLLCSRLCQQLRSKRKFFGTVPISRLHRRVVI

SEQ ID NO: 34495 - protein, 42 aa, Artificial Sequence
  Quasi-synthetic sequence derived from human genome
RLLLKWRGSIYKLLYREFIVFAVLYTAISLVYRLLLTGVQKR

SEQ ID NO: 34496 - protein, 42 aa, Artificial Sequence
  Quasi-synthetic sequence derived from human genome
RRHYYLLRQFKIFSDFRMNKAFVTWKLNVKRIKTEKSRSFLY

SEQ ID NO: 34497 - protein, 42 aa, Artificial Sequence
  Quasi-synthetic sequence derived from human genome
LHKDSQQKTVKKKIKPTLPLRIFINVSRFFCVQLKKMVRLMY

SEQ ID NO: 34498 - protein, 42 aa, Artificial Sequence
  Quasi-synthetic sequence derived from human genome
RELTKIPIFSLFRKWKAFSVWRKNVRSKKITGCQKSLQKNLF

SEQ ID NO: 34499 - protein, 42 aa, Artificial Sequence
  Quasi-synthetic sequence derived from human genome
FFRRPKASLPRVFVLRALLMVLVFLLVVSYWLFYGVRILDAR

SEQ ID NO: 34500 - protein, 42 aa, Artificial Sequence
  Quasi-synthetic sequence derived from human genome
RRKKRLRHRVPPRKPEPLVKLHRTALHWACLKGHSQLVNKLL

SEQ ID NO: 34501 - protein, 42 aa, Artificial Sequence
  Quasi-synthetic sequence derived from human genome
KYLKVFYKFLNSNRPKIRHTEKKSFKCKKRVKLFCMLSHKTQ

SEQ ID NO: 34502 - protein, 42 aa, Artificial Sequence
  Quasi-synthetic sequence derived from human genome
TIFLLFMQSIATISLFLNILEIFHLGFKKIKRGLWGKYKLKK

SEQ ID NO: 34503 - protein, 42 aa, Artificial Sequence
  Quasi-synthetic sequence derived from human genome
VLAKKMLRKALKLLNRIFPYNLISLFLHIHVEKNRHFHYVNR

SEQ ID NO: 34504 - protein, 42 aa, Artificial Sequence
  Quasi-synthetic sequence derived from human genome
NIPLFRRFGRQRKIGGRGRIISPYRTPVLRRHRYSIFRSTTR

SEQ ID NO: 34505 - protein, 42 aa, Artificial Sequence
  Quasi-synthetic sequence derived from human genome
RRKHAVAVIWAYWLGLKVRREYRKFFRANAGKKIYEFTLQRI

SEQ ID NO: 34506 - protein, 42 aa, Artificial Sequence
  Quasi-synthetic sequence derived from human genome
KLSRALRYYYNKRILHKTKGKRFTYKFNFNKLVLVNYPFIDV

SEQ ID NO: 34507 - protein, 42 aa, Artificial Sequence
  Quasi-synthetic sequence derived from human genome
FFILRRKPVEQKKIFTIQGCYPVIRCLLRRRGWVEKKMVHRS

SEQ ID NO: 34508 - protein, 42 aa, Artificial Sequence
  Quasi-synthetic sequence derived from human genome
IIQKHCRGYLVRSLYQLIRMATITMQAYSRGFLARRRYRKML

SEQ ID NO: 34509 - protein, 42 aa, Artificial Sequence
  Quasi-synthetic sequence derived from human genome
LRQRQMDRHAKIKRAITFIMVVAIVFVICFLPSVVVRIRIFW

SEQ ID NO: 34510 - protein, 42 aa, Artificial Sequence
  Quasi-synthetic sequence derived from human genome
FFSHFFYLSLFFWMLFKALLIIYGILVIFRRMMKSRMMVIGF

SEQ ID NO: 34511 - protein, 42 aa, Artificial Sequence
  Quasi-synthetic sequence derived from human genome
LPAKASRSKTRLKSQLLLQKYIAQRKWKKHFYVVTAANRLRK

SEQ ID NO: 34512 - protein, 42 aa, Artificial Sequence
  Quasi-synthetic sequence derived from human genome
IQKHVRGWMARRHFQRLRDAAIVIQCAFRMLKARRELKALRI

SEQ ID NO: 34513 - protein, 42 aa, Artificial Sequence
  Quasi-synthetic sequence derived from human genome
RYLQRLLLVHGRWSYFRMCKFLCYFFYKNFAFTLVHFWFGFF

SEQ ID NO: 34514 - protein, 42 aa, Artificial Sequence
  Quasi-synthetic sequence derived from human genome
LRYSSILTSNRVAKMGLILAIRSILLVIPFPFTLRRLKYCQK

SEQ ID NO: 34515 - protein, 42 aa, Artificial Sequence
  Quasi-synthetic sequence derived from human genome
LRRVLVLMASKHAFLALCALRFKRKIIGLKDEFYNRYIMKSF

SEQ ID NO: 34516 - protein, 42 aa, Artificial Sequence
  Quasi-synthetic sequence derived from human genome
AKQKMRQAWKSWLIYVVVRRTKLQMQTTALEFRQRIILRVWW

SEQ ID NO: 34517 - protein, 42 aa, Artificial Sequence
  Quasi-synthetic sequence derived from human genome
AQILRSHLIKATVIPNRVKMLPYFGIIRNRMMSTHKSKKKIR

SEQ ID NO: 34518 - protein, 42 aa, Artificial Sequence
  Quasi-synthetic sequence derived from human genome
KLRRAAILRRERQQKAPRHPLADILHRGCPLLRRWLCRRCVV

SEQ ID NO: 34519 - protein, 42 aa, Artificial Sequence
  Quasi-synthetic sequence derived from human genome
KVLCERGNSLMNNRTGRRKSWRLEFLFLRRRCFLLTFYLWFL

SEQ ID NO: 34520 - protein, 42 aa, Artificial Sequence
  Quasi-synthetic sequence derived from human genome
IVDKIRRKNCPACRLRKCCQAGMVLGGRKFKKFNKVRVVRAL

SEQ ID NO: 34521 - protein, 42 aa, Artificial Sequence
  Quasi-synthetic sequence derived from human genome
TIPVFAFLGAMVVLAFFVVQINKAKSRPKRRKPRVKRPQLMQ

SEQ ID NO: 34522 - protein, 42 aa, Artificial Sequence
  Quasi-synthetic sequence derived from human genome
KKFYFHQHLCILKAKLGRPVTWNRQLRHFQGRKKALQIQKTW

SEQ ID NO: 34523 - protein, 42 aa, Artificial Sequence
  Quasi-synthetic sequence derived from human genome
LKLHFTCQRILFLKPSCMLEVITWPIQAFVKRKVIIFLKKCL

SEQ ID NO: 34524 - protein, 42 aa, Artificial Sequence
  Quasi-synthetic sequence derived from human genome
VVKILRVLRVLRPLRAINRAKGLKHVVQCMFVAISTIGNIVL

SEQ ID NO: 34525 - protein, 42 aa, Artificial Sequence
  Quasi-synthetic sequence derived from human genome
FYRNHKTFMVLNRKRTIYRFSAKHALFIFGPFNSIRSLAIRV

SEQ ID NO: 34526 - protein, 42 aa, Artificial Sequence
  Quasi-synthetic sequence derived from human genome
YSHRHGFRCQFANGIFQLWFHFKRYRYRRPGPCWRPIRHCRR

SEQ ID NO: 34527 - protein, 42 aa, Artificial Sequence
  Quasi-synthetic sequence derived from human genome
LLSRCFRSWRHLVKRQREPAAAAVALGRWQLLRKCLQALWLR

SEQ ID NO: 34528 - protein, 42 aa, Artificial Sequence
  Quasi-synthetic sequence derived from human genome
LRLQIIQRERRRKELFRKKNKAAAVIQRAWRSYQLRKHLSHL

SEQ ID NO: 34529 - protein, 42 aa, Artificial Sequence
  Quasi-synthetic sequence derived from human genome
VMLPTWWIVSSWLVWGVILFVYLVIRALRLWRTAKLQVTLKK

SEQ ID NO: 34530 - protein, 42 aa, Artificial Sequence
  Quasi-synthetic sequence derived from human genome
KRGVRTLHQRFLAQLRKYFNMRVFRQRTYRIWAFGIAAAALG

SEQ ID NO: 34531 - protein, 42 aa, Artificial Sequence
  Quasi-synthetic sequence derived from human genome
KRQLFFRKKLLHSSQMLRAVSLGQDRYRRRYWVLPYLAGIFV

SEQ ID NO: 34532 - protein, 42 aa, Artificial Sequence
  Quasi-synthetic sequence derived from human genome
RLLPRNTFSRKAFKLKKPSKYCSWKCAALSAIAAALLLAILL

SEQ ID NO: 34533 - protein, 42 aa, Artificial Sequence
  Quasi-synthetic sequence derived from human genome
ALPLVAMAAGGRWVRQQGPRVRRGISRLWLRVLLRLSPMAFR

SEQ ID NO: 34534 - protein, 42 aa, Artificial Sequence
  Quasi-synthetic sequence derived from human genome
KRSIKLLSLIKWKGSKSSKLNSKFWKHLVYEMPIKKKEMLPR

SEQ ID NO: 34535 - protein, 42 aa, Artificial Sequence
  Quasi-synthetic sequence derived from human genome
RRIRAAVVLQKHYRMQRARQAYQRVRRAAVVIQAFTRAMFVR

SEQ ID NO: 34536 - protein, 42 aa, Artificial Sequence
  Quasi-synthetic sequence derived from human genome
RALPTSRLDLACSLSWNVIRYSLQKLRLVRWLLKKVFQCRRA

SEQ ID NO: 34537 - protein, 42 aa, Artificial Sequence
  Quasi-synthetic sequence derived from human genome
RKAGWLFFKPLVTVQKERKLELVARRKWKQYWVTLKGCTLLF

SEQ ID NO: 34538 - protein, 42 aa, Artificial Sequence
  Quasi-synthetic sequence derived from human genome
VTRPFLAPRLRSPALARRLLLAVWLAALLLAVPAAVYRHLWR

SEQ ID NO: 34539 - protein, 42 aa, Artificial Sequence
  Quasi-synthetic sequence derived from human genome
KFFFWIGYCNSSLNPVIYTVFNQDFRRSFKHILFRRRRRGFR

SEQ ID NO: 34540 - protein, 42 aa, Artificial Sequence
  Quasi-synthetic sequence derived from human genome
RSFRRHIRQHSALTRLRLRNVFRRFLRDFQPGRLSQQMVMVK

SEQ ID NO: 34541 - protein, 42 aa, Artificial Sequence
  Quasi-synthetic sequence derived from human genome
FRWMRLRIRRMADAWIQAIKSLAEKQNLEKRKRKKVLVHLGL

SEQ ID NO: 34542 - protein, 42 aa, Artificial Sequence
  Quasi-synthetic sequence derived from human genome
LLKKLGIKLQVLINLGLVYKVQQHNGIIFQFVAFIKRRQRAV

SEQ ID NO: 34543 - protein, 42 aa, Artificial Sequence
  Quasi-synthetic sequence derived from human genome
KIFRFVAPLYYINKECFKSALYKQTVNPILIKVAWKKAAKRK

SEQ ID NO: 34544 - protein, 42 aa, Artificial Sequence
  Quasi-synthetic sequence derived from human genome
KRYVAYFAQVKHLYNWNLPPRRILFIKHFIIYSIPRYVRDLK

SEQ ID NO: 34545 - protein, 42 aa, Artificial Sequence
  Quasi-synthetic sequence derived from human genome
FRIIQTLFSCKNHKKAKAIKLILLVVIVFFLFWTPYNVMIFL

SEQ ID NO: 34546 - protein, 42 aa, Artificial Sequence
  Quasi-synthetic sequence derived from human genome
LWELYRELGLFQGPALGLRNHLGRKLRRRKKKKAKRTTNWKI

SEQ ID NO: 34547 - protein, 42 aa, Artificial Sequence
  Quasi-synthetic sequence derived from human genome
RRLQARRFRRSRRTGRLVVLIILTFAAFWLPYHVVNLAEAGR

SEQ ID NO: 34548 - protein, 42 aa, Artificial Sequence
  Quasi-synthetic sequence derived from human genome
SQKRVVHLQLLRRHTLRAAERNVRRKKVSFQLERIIKKQRLL

SEQ ID NO: 34549 - protein, 42 aa, Artificial Sequence
  Quasi-synthetic sequence derived from human genome
RAAKWLHFPQLALRRRLGQLSCMSRPALKLRSWPLTVLYYLL

SEQ ID NO: 34550 - protein, 42 aa, Artificial Sequence
  Quasi-synthetic sequence derived from human genome
PRRGRLARCWARCRDWRRMALVSALLLMLFCVALWPVQCALK

SEQ ID NO: 34551 - protein, 42 aa, Artificial Sequence
  Quasi-synthetic sequence derived from human genome
THWRGVSFVYNHYLFSGCFLVVLLAILLYLLRLRRIHRRTPR

SEQ ID NO: 34552 - protein, 42 aa, Artificial Sequence
  Quasi-synthetic sequence derived from human genome
LIQAYWKGFQTRKRLKKLPSAVIALQRSFRSKRSKMLLEINR

SEQ ID NO: 34553 - protein, 42 aa, Artificial Sequence
  Quasi-synthetic sequence derived from human genome
LGVVLLLLLLFYVVRYCWLRRQAALQRRLSAMEKGKLHKPGK

SEQ ID NO: 34554 - protein, 42 aa, Artificial Sequence
  Quasi-synthetic sequence derived from human genome
LILWTLCSVLLPVFITFWCSLQRSRRQLHRRDIFRKSKHGWR

SEQ ID NO: 34555 - protein, 42 aa, Artificial Sequence
  Quasi-synthetic sequence derived from human genome
KLLFTPQHKMLRLRLPNLKMVRLRVSFSAVVFKAVSDICKIL

SEQ ID NO: 34556 - protein, 42 aa, Artificial Sequence
  Quasi-synthetic sequence derived from human genome
KNKDHFQFTNLFLCGLLSKAKQKLLRHLVPAAALRRKRKALW

SEQ ID NO: 34557 - protein, 42 aa, Artificial Sequence
  Quasi-synthetic sequence derived from human genome
RTGKRLNIRKVIPYIASQFRKDKIWLRRTKPSKRQYQICLAI

SEQ ID NO: 34558 - protein, 42 aa, Artificial Sequence
  Quasi-synthetic sequence derived from human genome
RRGRRRTRAAGSLLSRAAILLFISAFLVRVPSSVGHLVRLPR

SEQ ID NO: 34559 - protein, 42 aa, Artificial Sequence
  Quasi-synthetic sequence derived from human genome
VIALLFLCLLPLIVKHIRKKQAKKAAAIRAKKSSKVRASQEL

SEQ ID NO: 34560 - protein, 42 aa, Artificial Sequence
  Quasi-synthetic sequence derived from human genome
MRSGGRGRPRLRLGERGLMEPLLPPKRRLLPRVRLLPLLLAL

SEQ ID NO: 34561 - protein, 42 aa, Artificial Sequence
  Quasi-synthetic sequence derived from human genome
LINWFICSLCVPRVRKLWSSRRPRTRRNLLLGTACAIYLGFL

SEQ ID NO: 34562 - protein, 42 aa, Artificial Sequence
  Quasi-synthetic sequence derived from human genome
WRRRHWAVKMVTCFIIGLLFPVFSVCYLIAPKSPLGLFIRKP

SEQ ID NO: 34563 - protein, 42 aa, Artificial Sequence
  Quasi-synthetic sequence derived from human genome
RKRFFALPYVDHFLRLEREKRARIKARKENLERKKAKILLKK

SEQ ID NO: 34564 - protein, 42 aa, Artificial Sequence
  Quasi-synthetic sequence derived from human genome
FWARRASRTRLAAWARRALLSLRSPKARRGKARRRAAKLQSS

SEQ ID NO: 34565 - protein, 42 aa, Artificial Sequence
  Quasi-synthetic sequence derived from human genome
KTLLRCRNEKKRHRAVRLIFTIMIVYFLFWAPYNIVLLLNTF

SEQ ID NO: 34566 - protein, 42 aa, Artificial Sequence
  Quasi-synthetic sequence derived from human genome
LKAKKAVLKGVHSHKKKKIRTSPTFRRPKTLRLRRQPKYPRK

SEQ ID NO: 34567 - protein, 42 aa, Artificial Sequence
  Quasi-synthetic sequence derived from human genome
SWFRLSFVYNHYLFFACILVVLLAIFLYLLRLRRIHHRQTRA

SEQ ID NO: 34568 - protein, 42 aa, Artificial Sequence
  Quasi-synthetic sequence derived from human genome
RLQQGNMRKNVRVLSRTSKFRRLRQLLRRRKKRWQGRRGGSR

SEQ ID NO: 34569 - protein, 42 aa, Artificial Sequence
  Quasi-synthetic sequence derived from human genome
RRRRRGRTDGRRFLLRRAVPGHLGLARARVERAWLAAGLLKV

SEQ ID NO: 34570 - protein, 42 aa, Artificial Sequence
  Quasi-synthetic sequence derived from human genome
KMVGPGFLSLGLMMLVCGLVWVPIIKKKQKHRQKSNFLRSLK

SEQ ID NO: 34571 - protein, 42 aa, Artificial Sequence
  Quasi-synthetic sequence derived from human genome
IRKLIKDGLIIRKPVTVHSRARCRKNTLARRKGRHMGIGKRK

SEQ ID NO: 34572 - protein, 42 aa, Artificial Sequence
  Quasi-synthetic sequence derived from human genome
HGMMFVRNDCKVFRFCKSKCHKNFKKKRNPRKVRWTKAFRKA

SEQ ID NO: 34573 - protein, 42 aa, Artificial Sequence
  Quasi-synthetic sequence derived from human genome
RAQVRRILQRVPGKQRFGIYRFLPFFFVLGGTMEWIMIKVRV

SEQ ID NO: 34574 - protein, 42 aa, Artificial Sequence
  Quasi-synthetic sequence derived from human genome
IKILLRRPNEKKSKAVRLIFVIMIIFFLFWTPYNLTILISVF

SEQ ID NO: 34575 - protein, 42 aa, Artificial Sequence
  Quasi-synthetic sequence derived from human genome
KKCILRWLARQKTCPCCRKEVKRKKVVHMNKLRKTIGRLEVK

SEQ ID NO: 34576 - protein, 42 aa, Artificial Sequence
  Quasi-synthetic sequence derived from human genome
MRFSLAVLYQACCVALLLWLALLLSIQRRLPRERKIKYSKLL

SEQ ID NO: 34577 - protein, 42 aa, Artificial Sequence
  Quasi-synthetic sequence derived from human genome
RARRKKSSARKFGLQKLWEWCLGLVQMSSLPWRVVIGRLGRI

SEQ ID NO: 34578 - protein, 42 aa, Artificial Sequence
  Quasi-synthetic sequence derived from human genome
LKRNMMPWALQKKREIHMAKAHRRRAARSALPMRLTSCIFRR

SEQ ID NO: 34579 - protein, 42 aa, Artificial Sequence
  Quasi-synthetic sequence derived from human genome
TFYIRSYILNKDLLRKALILMNSKHTHLILCVLRFMRRMICL

SEQ ID NO: 34580 - protein, 42 aa, Artificial Sequence
  Quasi-synthetic sequence derived from human genome
LGVCANGLLIYRDRLRINRFAWPKILKISYKRSNFYIKIRPG

SEQ ID NO: 34581 - protein, 42 aa, Artificial Sequence
  Quasi-synthetic sequence derived from human genome
RKTIGGVALWRQQICAIARVRLLKLKHERKALLALLLILMAG

SEQ ID NO: 34582 - protein, 42 aa, Artificial Sequence
  Quasi-synthetic sequence derived from human genome
QPVLAGVVGGVCFLGVAVLVSILAGCLLNRRRAARRRRKRLR

SEQ ID NO: 34583 - protein, 42 aa, Artificial Sequence
  Quasi-synthetic sequence derived from human genome
KKYRFHKTRSHVTHRTPKVKKSPKVRKKSYLSRLMLANRLPF

SEQ ID NO: 34584 - protein, 42 aa, Artificial Sequence
  Quasi-synthetic sequence derived from human genome
KRPKNFGIGQDIQPKRDLTRFVKWPRYIRLQRQRAILYKRLK

SEQ ID NO: 34585 - protein, 42 aa, Artificial Sequence
  Quasi-synthetic sequence derived from human genome
KRALKVKQAMMQLYVLKLLKVQTKYLGRQWRKSNMKTMSAIY

SEQ ID NO: 34586 - protein, 42 aa, Artificial Sequence
  Quasi-synthetic sequence derived from human genome
ISLRFKRTHIKMKKQPKGYGLRCHRAIITICRLIGIKDMYAK

SEQ ID NO: 34587 - protein, 42 aa, Artificial Sequence
  Quasi-synthetic sequence derived from human genome
RPRVFIKDMAPGKVVPMNCWGVYQAVRWLRWKASLIKLRALR

SEQ ID NO: 34588 - protein, 42 aa, Artificial Sequence
  Quasi-synthetic sequence derived from human genome
ILKAVKIIQGCFYTKLERTRFLNVRASAIIIQRKWRAILPAK

SEQ ID NO: 34589 - protein, 42 aa, Artificial Sequence
  Quasi-synthetic sequence derived from human genome
RPKRLLLVLVSAFFIFWSPFNVVLLVHLWRRVMLKEIYHPRM

SEQ ID NO: 34590 - protein, 42 aa, Artificial Sequence
  Quasi-synthetic sequence derived from human genome
TLRGRRCHCLPFPKRGMQRWMLPLRRGARLLPLASSKNPRAR

SEQ ID NO: 34591 - protein, 42 aa, Artificial Sequence
  Quasi-synthetic sequence derived from human genome
LLMVLRCLRPLRIFKLVPQMRKVVRELFSGFKEIFLVSILLL

SEQ ID NO: 34592 - protein, 42 aa, Artificial Sequence
  Quasi-synthetic sequence derived from human genome
LPKPRMRGLLARRLRNHMAVAFVLSLGVAALYKFRVADQRKK

SEQ ID NO: 34593 - protein, 42 aa, Artificial Sequence
  Quasi-synthetic sequence derived from human genome
ASGQKAPRPAARRKARRLLKTVLMILLAFLVCWGPLFGLLLA

SEQ ID NO: 34594 - protein, 42 aa, Artificial Sequence
  Quasi-synthetic sequence derived from human genome
MRRTRRPRFVLMNKMDDLNLHYRFLNWRRRIREIREVRAFRY

SEQ ID NO: 34595 - protein, 42 aa, Artificial Sequence
  Quasi-synthetic sequence derived from human genome
RLHKTGLRGRKGNLAICVIILLFILAVINLIITLVIWAVIRI

SEQ ID NO: 34596 - protein, 42 aa, Artificial Sequence
  Quasi-synthetic sequence derived from human genome
MVKIFMLLVVGITSGMWIWTSKTLQSWQQVCSRRLKKKSRRK

SEQ ID NO: 34597 - protein, 42 aa, Artificial Sequence
  Quasi-synthetic sequence derived from human genome
KGAVLYLLRGRKTFLIPVLFNNYITAALKLLEKLYKVNLKVK

SEQ ID NO: 34598 - protein, 42 aa, Artificial Sequence
  Quasi-synthetic sequence derived from human genome
RAVILHFFRGLLYWKNTLALAAILVLLRVRQCLSLRPAPAMR

SEQ ID NO: 34599 - protein, 42 aa, Artificial Sequence
  Quasi-synthetic sequence derived from human genome
RYLRVKLTVRFRIPGLPGCILSFQLKVCFLPVMWLFILLSLA

SEQ ID NO: 34600 - protein, 42 aa, Artificial Sequence
  Quasi-synthetic sequence derived from human genome
WRKTVCHNGVLGLSRLLFFLLGFLRIRVRGQRASRLQAPVLV

SEQ ID NO: 34601 - protein, 42 aa, Artificial Sequence
  Quasi-synthetic sequence derived from human genome
KTFTIKRFLAKKQKQNRPIPQWIQMKPGSKIRYNSKRRHWRR

SEQ ID NO: 34602 - protein, 42 aa, Artificial Sequence
  Quasi-synthetic sequence derived from human genome
ARSKNWRLSVRCGGWPLRWLMENGFLPDPPRIRYRKKKRILK

SEQ ID NO: 34603 - protein, 42 aa, Artificial Sequence
  Quasi-synthetic sequence derived from human genome
LARQRGVGQQAMSLAILRVIRLVRVFRIFKLSRHSKGLQILG

SEQ ID NO: 34604 - protein, 42 aa, Artificial Sequence
  Quasi-synthetic sequence derived from human genome
PLLLLLPLLLLKLHLWPQLRWLPADLAFAVRALCCKRALRAR

SEQ ID NO: 34605 - protein, 42 aa, Artificial Sequence
  Quasi-synthetic sequence derived from human genome
NREIALFLILLATAVILGSAVLLFHFCIFHRRKMKAIRRSLK

SEQ ID NO: 34606 - protein, 42 aa, Artificial Sequence
  Quasi-synthetic sequence derived from human genome
TLLRKLGVKLVQRLGLTFLKPKVAAWRYQRGCRSLAANLQLL

SEQ ID NO: 34607 - protein, 42 aa, Artificial Sequence
  Quasi-synthetic sequence derived from human genome
RWARPFYLAFVFCLALGLLQAIKLYLRRQRLLRDLRPFPAPP

SEQ ID NO: 34608 - protein, 42 aa, Artificial Sequence
  Quasi-synthetic sequence derived from human genome
LFIIIKVKSSGIRVGSSKRKKSEKKVTRMVSIVVAVFIFCWL

SEQ ID NO: 34609 - protein, 42 aa, Artificial Sequence
  Quasi-synthetic sequence derived from human genome
SAPLLYFLFICPFVLLLLLLISLLCLYWKARKLSTLRSNTRK

SEQ ID NO: 34610 - protein, 42 aa, Artificial Sequence
  Quasi-synthetic sequence derived from human genome
MVLKPHFHKDWQRRVATWFNQPARKIRRRKARQAKARRIAPR

SEQ ID NO: 34611 - protein, 42 aa, Artificial Sequence
  Quasi-synthetic sequence derived from human genome
LKWRVKKVVLVLLLVTSVFLFLNIALINIHINASINGYRRNK

SEQ ID NO: 34612 - protein, 42 aa, Artificial Sequence
  Quasi-synthetic sequence derived from human genome
LATLIQKIYRGWKCRTHFLLMKKSQIVIAAWYRRYAQQKRYQ

SEQ ID NO: 34613 - protein, 42 aa, Artificial Sequence
  Quasi-synthetic sequence derived from human genome
TKNWKIILCLFIIPLVGCGFVSFRKKPVDKHKKLLWYYVAFF

SEQ ID NO: 34614 - protein, 42 aa, Artificial Sequence
  Quasi-synthetic sequence derived from human genome
LARRAFQKRQQQQSALRVMQRNCAAYLKLRHWQWWRLFTKVK

SEQ ID NO: 34615 - protein, 42 aa, Artificial Sequence
  Quasi-synthetic sequence derived from human genome
FAGRLVVYKIVYMFLFLLCLTLFQVYYSLWRKLLKAFWWLVV

SEQ ID NO: 34616 - protein, 42 aa, Artificial Sequence
  Quasi-synthetic sequence derived from human genome
PVFYGFKNIFITMFATFFFFKLLIKVFLALLTHFYIVKGNRK

SEQ ID NO: 34617 - protein, 42 aa, Artificial Sequence
  Quasi-synthetic sequence derived from human genome
VFKHKHKDCVLYLLSKMWSTVSFPKISVPMRIYIKIKQWILR

SEQ ID NO: 34618 - protein, 42 aa, Artificial Sequence
  Quasi-synthetic sequence derived from human genome
SKCKTHCLATKKLDLWRLPPILIIHLKRFQFVNGRWIKSQKI

SEQ ID NO: 34619 - protein, 42 aa, Artificial Sequence
  Quasi-synthetic sequence derived from human genome
RISITFFRLFRVMRLVKLLSRGEGIRTLLWTFIKSFQALPYV

SEQ ID NO: 34620 - protein, 42 aa, Artificial Sequence
  Quasi-synthetic sequence derived from human genome
PRFQAAPVPLLLMILKPVQKLFAIIVGRGIRKWWQALPPNKK

SEQ ID NO: 34621 - protein, 42 aa, Artificial Sequence
  Quasi-synthetic sequence derived from human genome
KFFLYVCMYVCIREKILLYKTHWMTPIFLKVVINTRRIKHHF

SEQ ID NO: 34622 - protein, 42 aa, Artificial Sequence
  Quasi-synthetic sequence derived from human genome
LVAMAAGGRWVRQQGPRVRRGISRLWLRVLLRLSPMAFRALQ

SEQ ID NO: 34623 - protein, 42 aa, Artificial Sequence
  Quasi-synthetic sequence derived from human genome
RKGIVRVVFFPFFFRWWLQVTSKVIFFWLLVLYLLQVAAIVL

SEQ ID NO: 34624 - protein, 42 aa, Artificial Sequence
  Quasi-synthetic sequence derived from human genome
RFLARRTNSTFNQVVLKRLFMSRTNRPPLSLSRMIRKMKLPG

SEQ ID NO: 34625 - protein, 42 aa, Artificial Sequence
  Quasi-synthetic sequence derived from human genome
KRKHFRLVLRLVLRGGRELGTFHSRLIKVISKPSQKKQSLKN

SEQ ID NO: 34626 - protein, 42 aa, Artificial Sequence
  Quasi-synthetic sequence derived from human genome
TKILGMLRVLRLLRTLRPLRVISRAQGLKLVVETLMSSLKPI

SEQ ID NO: 34627 - protein, 42 aa, Artificial Sequence
  Quasi-synthetic sequence derived from human genome
KRRKKRYLRHDKPPYTYLAMIALVIQAAPSRRLKLAQIIRQV

SEQ ID NO: 34628 - protein, 42 aa, Artificial Sequence
  Quasi-synthetic sequence derived from human genome
MYKVPLIRKKSLRRTLSERGLLKDFLKKHNLNPARKYFPQWK

SEQ ID NO: 34629 - protein, 42 aa, Artificial Sequence
  Quasi-synthetic sequence derived from human genome
LLGRLLIYKQGRKLFPIKLKNKKGLVSLIDLLVLFTQLIYYS

SEQ ID NO: 34630 - protein, 42 aa, Artificial Sequence
  Quasi-synthetic sequence derived from human genome
PLCAILKQKAPQQYRIRAKLRSYKPRRLFQSVKLHCPKCHLL

SEQ ID NO: 34631 - protein, 42 aa, Artificial Sequence
  Quasi-synthetic sequence derived from human genome
LTIILLPVHLLITIYSALIFIPWYFLTNAKKKNAMAKRIKAK

SEQ ID NO: 34632 - protein, 42 aa, Artificial Sequence
  Quasi-synthetic sequence derived from human genome
RTPMSWSRIKKILKEGPMLKNCNSFKRWKLRYFLVQGQKLYF

SEQ ID NO: 34633 - protein, 42 aa, Artificial Sequence
  Quasi-synthetic sequence derived from human genome
LGVCANGLLIYKDRLRINRFAWPKILKISYKRSNFYIKVRPA

SEQ ID NO: 34634 - protein, 42 aa, Artificial Sequence
  Quasi-synthetic sequence derived from human genome
LRYSFLKTASFFVRLGPMALAFKVRGLLDCKHSWKRLKDIRK

SEQ ID NO: 34635 - protein, 42 aa, Artificial Sequence
  Quasi-synthetic sequence derived from human genome
RPLVLTAWGLALEMAWVEPAWAAHWLMRRRRRKQRKKKAWIY

SEQ ID NO: 34636 - protein, 42 aa, Artificial Sequence
  Quasi-synthetic sequence derived from human genome
ALPGTFFFIIGLWWCTKSILKYICKKQKRTCYLGSKTLFYRL

SEQ ID NO: 34637 - protein, 42 aa, Artificial Sequence
  Quasi-synthetic sequence derived from human genome
QRRLRLQQLATLIQKIYRGWRCRTHYQLMRKSQILISSWFRG

SEQ ID NO: 34638 - protein, 42 aa, Artificial Sequence
  Quasi-synthetic sequence derived from human genome
FWRRLLGLLPGRPGLAALLGRLSDRLGRNRDRQRRRSPWLLL

SEQ ID NO: 34639 - protein, 42 aa, Artificial Sequence
  Quasi-synthetic sequence derived from human genome
KKSKVHYHVAVIINYLGHCISLVALLVAFVLFLRLRSIRCLR

SEQ ID NO: 34640 - protein, 42 aa, Artificial Sequence
  Quasi-synthetic sequence derived from human genome
LHILEHRVRVLSVARPGLWLYTHPLIKLLFLPRRSRCKFFSL

SEQ ID NO: 34641 - protein, 42 aa, Artificial Sequence
  Quasi-synthetic sequence derived from human genome
RPKHWFQLCRPMNPRARKNCSQIALFQKRRFQFFCSMRCRAW

SEQ ID NO: 34642 - protein, 42 aa, Artificial Sequence
  Quasi-synthetic sequence derived from human genome
KKMIIWFPDMVKDVIGSYKKWCRSILRRTSLILARVFGLHLR

SEQ ID NO: 34643 - protein, 42 aa, Artificial Sequence
  Quasi-synthetic sequence derived from human genome
KKQRKILWRKGIHLAFSEKWNTGFGGFKKFYFHQHLCILKAK

SEQ ID NO: 34644 - protein, 42 aa, Artificial Sequence
  Quasi-synthetic sequence derived from human genome
RRMALSMIERRKRWRTIKLLLRRGADPNLCCVPMQVLFLAVK

SEQ ID NO: 34645 - protein, 42 aa, Artificial Sequence
  Quasi-synthetic sequence derived from human genome
RLQHGNMRKNMRVLSRISKFRRLRQLLRRRKKTRQGRRGGSC

SEQ ID NO: 34646 - protein, 42 aa, Artificial Sequence
  Quasi-synthetic sequence derived from human genome
IWAVIKPGTSFGISVLRALRLLRIFKVTKYWASLRNLVVSLL

SEQ ID NO: 34647 - protein, 42 aa, Artificial Sequence
  Quasi-synthetic sequence derived from human genome
LKWKIFTNFKMNILGLLIPFTIFMFCYIKILHQLKRCQNHNK

SEQ ID NO: 34648 - protein, 42 aa, Artificial Sequence
  Quasi-synthetic sequence derived from human genome
RKRGKNPMKAVGLAWYSLYTRTWLGYLFYRQQLRRARNRYPK

SEQ ID NO: 34649 - protein, 42 aa, Artificial Sequence
  Quasi-synthetic sequence derived from human genome
MRKRKISVCQQTWALLCKNFLKKWRMKRESLMEWLNSLLLLL

SEQ ID NO: 34650 - protein, 42 aa, Artificial Sequence
  Quasi-synthetic sequence derived from human genome
RLRNAKIYVERAVKQKKIFTIQGCYPVIRCLLRRRGWVEKKM

SEQ ID NO: 34651 - protein, 42 aa, Artificial Sequence
  Quasi-synthetic sequence derived from human genome
INKKTFIVLNKGKAIFRFSATSALYILTPFNPLRKIAIKILV

SEQ ID NO: 34652 - protein, 42 aa, Artificial Sequence
  Quasi-synthetic sequence derived from human genome
KQKKKYMPYNHQHKYFFLIGPPALLPLYFQWYIFYFVIQRKK

SEQ ID NO: 34653 - protein, 42 aa, Artificial Sequence
  Quasi-synthetic sequence derived from human genome
RLTRWRTRYKTIRINLGLWAASFILALPVWVYSKVIKFKDGV

SEQ ID NO: 34654 - protein, 42 aa, Artificial Sequence
  Quasi-synthetic sequence derived from human genome
GRRVSKALMASMARRASRGPIAFWARRASRTRLAAWARRALL

SEQ ID NO: 34655 - protein, 42 aa, Artificial Sequence
  Quasi-synthetic sequence derived from human genome
LRKVHLFTIIQMSCLGLLWIIKVSRAAIVFPMMVLALVFVRK

SEQ ID NO: 34656 - protein, 42 aa, Artificial Sequence
  Quasi-synthetic sequence derived from human genome
RGYLARQRYQQMRRSLVKFRSLVHAYVSRRRYLKLRAEWRCQ

SEQ ID NO: 34657 - protein, 42 aa, Artificial Sequence
  Quasi-synthetic sequence derived from human genome
WICQVCRPKKKGRKLLHEKAAQIKRRYAKPIGRPKNKLKQRL

SEQ ID NO: 34658 - protein, 42 aa, Artificial Sequence
  Quasi-synthetic sequence derived from human genome
GKEIYNTIRRKTKDAFYKNIVKKGYLLKKGKGKRWKNLYFIL

SEQ ID NO: 34659 - protein, 42 aa, Artificial Sequence
  Quasi-synthetic sequence derived from human genome
LVRHKFNRLPRVLILHLKRYSFNVALSLNNKIGQQVIIPRYL

SEQ ID NO: 34660 - protein, 42 aa, Artificial Sequence
  Quasi-synthetic sequence derived from human genome
LFLLLLLLGTIATIVFFCCWHRKLQKGRHPMKSVFSGRSRSR

SEQ ID NO: 34661 - protein, 42 aa, Artificial Sequence
  Quasi-synthetic sequence derived from human genome
LAFRKAKIRDRVSKLLASVILLPWPPKVLGLKNVTGRLLVGL

SEQ ID NO: 34662 - protein, 42 aa, Artificial Sequence
  Quasi-synthetic sequence derived from human genome
KISTAQKYVLARRRLVKVINNRAKLLSLCSFIIETCLFILWR

SEQ ID NO: 34663 - protein, 42 aa, Artificial Sequence
  Quasi-synthetic sequence derived from human genome
RTLHNMMKKLFLQLIAEFKRLGSSVIYANFNRIILCTKKRRV

SEQ ID NO: 34664 - protein, 42 aa, Artificial Sequence
  Quasi-synthetic sequence derived from human genome
LPFFCFLLGKCFKKGLKGKGFVLLVKLACIVVASFVLCWLPF

SEQ ID NO: 34665 - protein, 42 aa, Artificial Sequence
  Quasi-synthetic sequence derived from human genome
HHTKALSSRRLFVRRGQPFTIILYFRAPVRAFLPALKKVALT

SEQ ID NO: 34666 - protein, 42 aa, Artificial Sequence
  Quasi-synthetic sequence derived from human genome
VRPPLLPYIVNIKGQRIKKSVAYKTKKPPSLMYNVRKKKGKI

SEQ ID NO: 34667 - protein, 42 aa, Artificial Sequence
  Quasi-synthetic sequence derived from human genome
RMRRYRMTHSEKKRLKQCNVITRLRGLQVPVGLPFLLILLGL

SEQ ID NO: 34668 - protein, 42 aa, Artificial Sequence
  Quasi-synthetic sequence derived from human genome
FPKSFFSSKAKVIYLMRNPRDVLVSGYFFWKNMKFIKKPKSW

SEQ ID NO: 34669 - protein, 42 aa, Artificial Sequence
  Quasi-synthetic sequence derived from human genome
KTVRGWLQKVKYHRLKGATLTLQRYCRGHLARRLAEHLRRIR

SEQ ID NO: 34670 - protein, 42 aa, Artificial Sequence
  Quasi-synthetic sequence derived from human genome
RVKAAPGPKAALAVIRGGATRAAGVFYPWRFRLLCLLRRWLP

SEQ ID NO: 34671 - protein, 42 aa, Artificial Sequence
  Quasi-synthetic sequence derived from human genome
IRHMIRKNKYRPDLRMAAIRRASAILRSQKPVMVKRKRTRPT

SEQ ID NO: 34672 - protein, 42 aa, Artificial Sequence
  Quasi-synthetic sequence derived from human genome
PWRSPLLLLAMWGPQAPPCLCRKRGRGACIKCERLRPRIRRR

SEQ ID NO: 34673 - protein, 42 aa, Artificial Sequence
  Quasi-synthetic sequence derived from human genome
KIMVRRCLVTLRPFRLFVLGIGFFTLCFLMTSLGGQFSARRL

SEQ ID NO: 34674 - protein, 42 aa, Artificial Sequence
  Quasi-synthetic sequence derived from human genome
LKAVLQKQGIWSEIHFILTNPRSLKHLCRLKIRKCMGRLHLR

SEQ ID NO: 34675 - protein, 42 aa, Artificial Sequence
  Quasi-synthetic sequence derived from human genome
LRTLRAVRVLRPLKLVSGIPSLQIVLKSIMKAMVPLLQIGLL

SEQ ID NO: 34676 - protein, 42 aa, Artificial Sequence
  Quasi-synthetic sequence derived from human genome
KLILPNKQKNAAKSNLLQCYAFRALRFLFSMERNRPLFKRLF

SEQ ID NO: 34677 - protein, 42 aa, Artificial Sequence
  Quasi-synthetic sequence derived from human genome
RRRKKKERRPRGTMQAINNERKASKVLGIVFFVFLIMWCPFF

SEQ ID NO: 34678 - protein, 42 aa, Artificial Sequence
  Quasi-synthetic sequence derived from human genome
KKRNSTLYITMLLIVPVIVAGAIIVLLLYLKRLKIIIFPPIP

SEQ ID NO: 34679 - protein, 42 aa, Artificial Sequence
  Quasi-synthetic sequence derived from human genome
RYRVLVHPMASRRQQRRRQARVTCVLIWVVGGLLSIPTFLLR

SEQ ID NO: 34680 - protein, 42 aa, Artificial Sequence
  Quasi-synthetic sequence derived from human genome
FWFVLKVVLIIIRLKKYEKRGELVTVLDKFLSHAKRQPRKPF

SEQ ID NO: 34681 - protein, 42 aa, Artificial Sequence
  Quasi-synthetic sequence derived from human genome
LPLRLVWKEVILRKILILVLVQKDVSLTTQYFLQKARSRRHR

SEQ ID NO: 34682 - protein, 42 aa, Artificial Sequence
  Quasi-synthetic sequence derived from human genome
IKNQTILKKGKRENIVNIRKQREKAAILIQAVWKGFILRKKL

SEQ ID NO: 34683 - protein, 42 aa, Artificial Sequence
  Quasi-synthetic sequence derived from human genome
IAWLLYCHKTRLKKILKESRQRHLENFRIRAKHLAANWNRIR

SEQ ID NO: 34684 - protein, 42 aa, Artificial Sequence
  Quasi-synthetic sequence derived from human genome
KKKMSKLSRSARAGVIFPVGRLMRYLKKGTFKYRISVGAPVY

SEQ ID NO: 34685 - protein, 42 aa, Artificial Sequence
  Quasi-synthetic sequence derived from human genome
LQLLLAKVMRFERFGRRRVIIKKGQKGNSFYFIYLGTVAITK

SEQ ID NO: 34686 - protein, 42 aa, Artificial Sequence
  Quasi-synthetic sequence derived from human genome
LGVCASGLLIYRDRLRINRFAWPKVLKISYKRNNFYIKIRPG

SEQ ID NO: 34687 - protein, 42 aa, Artificial Sequence
  Quasi-synthetic sequence derived from human genome
KYIQNLQGLFALPFGRTAKPAHIAKVKMKFRFLGKLMAKAIM

SEQ ID NO: 34688 - protein, 42 aa, Artificial Sequence
  Quasi-synthetic sequence derived from human genome
WRVASGARRFRRWLNRYSYTVLSSWPERALISLKNRSRFLVR

SEQ ID NO: 34689 - protein, 42 aa, Artificial Sequence
  Quasi-synthetic sequence derived from human genome
RIARILAGSKKKICTKKPRFMSACAQLVIAFILICIQLGIIV

SEQ ID NO: 34690 - protein, 42 aa, Artificial Sequence
  Quasi-synthetic sequence derived from human genome
RILHGLGFTPAMQRKKLKDFSGGWRMRVALARALFIRPFMLL

SEQ ID NO: 34691 - protein, 42 aa, Artificial Sequence
  Quasi-synthetic sequence derived from human genome
RVRKLRSAGRCGKFHQVRRVMTILFLTMVISYFGCMKAAPMK

SEQ ID NO: 34692 - protein, 42 aa, Artificial Sequence
  Quasi-synthetic sequence derived from human genome
CTTVFTLLLLSIVILYCRIYSLVRTRSRRLTFRKNISKASRS

SEQ ID NO: 34693 - protein, 42 aa, Artificial Sequence
  Quasi-synthetic sequence derived from human genome
LKKTAIKIQSVYRGIRVRRHIQHMHRAATFIKAMFKMHQSRI

SEQ ID NO: 34694 - protein, 42 aa, Artificial Sequence
  Quasi-synthetic sequence derived from human genome
KKYRFHKTRSHVTHRTTKVKKSPKVRKKSYLSRLMLANRLPF

SEQ ID NO: 34695 - protein, 42 aa, Artificial Sequence
  Quasi-synthetic sequence derived from human genome
FWKKIIAYQQKLLNYFARNFYNMRMLALFVAFAINFILLFYK

SEQ ID NO: 34696 - protein, 42 aa, Artificial Sequence
  Quasi-synthetic sequence derived from human genome
VTLIILAVVGGVIGLLILILLIKKLIIFILKKTREKKKECLV

SEQ ID NO: 34697 - protein, 42 aa, Artificial Sequence
  Quasi-synthetic sequence derived from human genome
VMRRHCRTLRQRSRRPKMRPARRRGGRRQLLLRALDAVATCW

SEQ ID NO: 34698 - protein, 42 aa, Artificial Sequence
  Quasi-synthetic sequence derived from human genome
IRTLRDQLLLLHNQLLYERFKRQQHALRNRRLLRKVIKAAAL

SEQ ID NO: 34699 - protein, 42 aa, Artificial Sequence
  Quasi-synthetic sequence derived from human genome
KLDRTAFKKTVNIPVLKVRKEIVSKLMRSLKRAALQRPGIRR

SEQ ID NO: 34700 - protein, 42 aa, Artificial Sequence
  Quasi-synthetic sequence derived from human genome
MLKALFRTLQAMLLGVWILLLLASLTPLWLYCWRMFPTKGKR

SEQ ID NO: 34701 - protein, 42 aa, Artificial Sequence
  Quasi-synthetic sequence derived from human genome
LGIFIYQLCNNRKSFRLRRRDLLLGFNKRAIDKCWKIRHFPN

SEQ ID NO: 34702 - protein, 42 aa, Artificial Sequence
  Quasi-synthetic sequence derived from human genome
IMYKVPLIRKKSLRRTLSERGLLKDFLKKHNLNPARKYFPQW

SEQ ID NO: 34703 - protein, 42 aa, Artificial Sequence
  Quasi-synthetic sequence derived from human genome
KQLFLKAQKIVHKLFSLSKRCHKQPLISLPRQRTSTYWLTRI

SEQ ID NO: 34704 - protein, 42 aa, Artificial Sequence
  Quasi-synthetic sequence derived from human genome
KLLRHLVPAAALRRKRKALWAHLFSSLRGYLKSLPRVQVESF

SEQ ID NO: 34705 - protein, 42 aa, Artificial Sequence
  Quasi-synthetic sequence derived from human genome
RLVRMKVFHLSLSQSVVLRHHWILPFVQALKARMTSFHRFFF

SEQ ID NO: 34706 - protein, 42 aa, Artificial Sequence
  Quasi-synthetic sequence derived from human genome
RRRRRAKITGRERKAMRVLPVVVGAFLLCWTPFFVVHITQAL

SEQ ID NO: 34707 - protein, 42 aa, Artificial Sequence
  Quasi-synthetic sequence derived from human genome
KKIMAILIKRFHHTRRNWKGLIAQVILPIVFVTTAMGLGTLR

SEQ ID NO: 34708 - protein, 42 aa, Artificial Sequence
  Quasi-synthetic sequence derived from human genome
FLMLINVDRYAAIVHPLRLRHLRRPRVARLLCLGVWALILVF

SEQ ID NO: 34709 - protein, 42 aa, Artificial Sequence
  Quasi-synthetic sequence derived from human genome
FNDIVKQGYVKIRSRKLGIFRRCWLVFKKASSKGPRRLEKFP

SEQ ID NO: 34710 - protein, 42 aa, Artificial Sequence
  Quasi-synthetic sequence derived from human genome
YRLNKICSGLSFQRKNQFMQRLHNYWLLKRQARNGVPLIRRL

SEQ ID NO: 34711 - protein, 42 aa, Artificial Sequence
  Quasi-synthetic sequence derived from human genome
RLRVKAVTKIREFILQKIYSFRKPMTNYQIPQTALLKYRFFY

SEQ ID NO: 34712 - protein, 42 aa, Artificial Sequence
  Quasi-synthetic sequence derived from human genome
KLFIAPLIMVLGLALGAIAVVIGLFVFPIYCLCKKQRKRSRT

SEQ ID NO: 34713 - protein, 42 aa, Artificial Sequence
  Quasi-synthetic sequence derived from human genome
KSLRPIGLLRAQSLEWFYNNVKSRFKRFGSAKVLKNLYRKHR

SEQ ID NO: 34714 - protein, 42 aa, Artificial Sequence
  Quasi-synthetic sequence derived from human genome
LVWKNWLGVKRQPLWTLVLILWPVIIFIILAITRTKFPPTAK

SEQ ID NO: 34715 - protein, 42 aa, Artificial Sequence
  Quasi-synthetic sequence derived from human genome
FRKMMERRESIFCIQYNIRAFMNVKHWPWMKLYFKIKPLLKS

SEQ ID NO: 34716 - protein, 42 aa, Artificial Sequence
  Quasi-synthetic sequence derived from human genome
LRCIRLLRIFKITKYWTSLSNLVASLLNSIRSIASLLLLLFL

SEQ ID NO: 34717 - protein, 42 aa, Artificial Sequence
  Quasi-synthetic sequence derived from human genome
LFYLGLTMVGKIKRLKKSAFVVLILLITAKLLVLPLLCREMV

SEQ ID NO: 34718 - protein, 42 aa, Artificial Sequence
  Quasi-synthetic sequence derived from human genome
KHITSKINAILAHNSPVLIVQRWIRGFLVRKNLSPVFFHKKK

SEQ ID NO: 34719 - protein, 42 aa, Artificial Sequence
  Quasi-synthetic sequence derived from human genome
FNRYLTRRRRIEIAHALCLSERQIKIWFQNRRMKWKKDNKLK

SEQ ID NO: 34720 - protein, 42 aa, Artificial Sequence
  Quasi-synthetic sequence derived from human genome
LKKYKIACIVLLALLVIMSLGLGLGLGLRKLEKQGSCRKKCF

SEQ ID NO: 34721 - protein, 42 aa, Artificial Sequence
  Quasi-synthetic sequence derived from human genome
KKAYVVCTFVFGYLLPLLLICFCYAKVLNHLHKKLKNMSKKS

SEQ ID NO: 34722 - protein, 42 aa, Artificial Sequence
  Quasi-synthetic sequence derived from human genome
KWIVKPPASARGIGIQVIHKWSQLPKRRPLLVQRYLHKPYLI

SEQ ID NO: 34723 - protein, 42 aa, Artificial Sequence
  Quasi-synthetic sequence derived from human genome
HKPRVTNIFPKQKYLSKKTTKRKRGYIKNKLVFKKGKKISKK

SEQ ID NO: 34724 - protein, 42 aa, Artificial Sequence
  Quasi-synthetic sequence derived from human genome
RKWKQLSRLQRNMILFLLAFLLFCGLLFYINLADHWKALAFR

SEQ ID NO: 34725 - protein, 42 aa, Artificial Sequence
  Quasi-synthetic sequence derived from human genome
RRKALDLLNNKLQQNISWKKTIVTRFLKLVPDLLAIVQRKKK

SEQ ID NO: 34726 - protein, 42 aa, Artificial Sequence
  Quasi-synthetic sequence derived from human genome
GRVALARVSSVKLISKAKIRTVKMTFIIVLAFIVCWTPFFFV

SEQ ID NO: 34727 - protein, 42 aa, Artificial Sequence
  Quasi-synthetic sequence derived from human genome
KVKKPKKVYCYVSPKQFSVKEFYLKIIPWRLYTFRVCPGTKF

SEQ ID NO: 34728 - protein, 42 aa, Artificial Sequence
  Quasi-synthetic sequence derived from human genome
RLWGIRKNKPNMNYDKLSRALRYYYVKNIIKKVNGQKFVYKF

SEQ ID NO: 34729 - protein, 42 aa, Artificial Sequence
  Quasi-synthetic sequence derived from human genome
LLGRKRRWSKCKIRVFVGGQINRMDQERKAIISLLSKFRLGF

SEQ ID NO: 34730 - protein, 42 aa, Artificial Sequence
  Quasi-synthetic sequence derived from human genome
RLVRVFRIFKLSRHSKGLQILGKTLQASMRELGLLIFFLFIG

SEQ ID NO: 34731 - protein, 42 aa, Artificial Sequence
  Quasi-synthetic sequence derived from human genome
SRPALKLRSWPLTVLYYLLPFGALRPLSRVGWRPVSRVALYK

SEQ ID NO: 34732 - protein, 42 aa, Artificial Sequence
  Quasi-synthetic sequence derived from human genome
RLILPQMPKALFRKKVILEDKVKNFYTRLPFQKLMGISIRNK

SEQ ID NO: 34733 - protein, 42 aa, Artificial Sequence
  Quasi-synthetic sequence derived from human genome
RHFLLRKKQEKFTSGIIKIQALWRGYSWRKKNDCTKIKAIRL

SEQ ID NO: 34734 - protein, 42 aa, Artificial Sequence
  Quasi-synthetic sequence derived from human genome
RPAVHRGIRYLLYRAQRAIRLRHALRLHPQLHRAPIRTWSPH

SEQ ID NO: 34735 - protein, 42 aa, Artificial Sequence
  Quasi-synthetic sequence derived from human genome
GYKKKLWKKTPARKKRLREFVFCNKTQSKLLDKMTTSFWKRR

SEQ ID NO: 34736 - protein, 42 aa, Artificial Sequence
  Quasi-synthetic sequence derived from human genome
KIANFSNLIFLHLKRRVKSVILVMLLGPLLFLACQLFVINMK

SEQ ID NO: 34737 - protein, 42 aa, Artificial Sequence
  Quasi-synthetic sequence derived from human genome
FLRRPGAPASWIWWRMLRQVLRRGLQSFCHRLGLCVSRHPVF

SEQ ID NO: 34738 - protein, 42 aa, Artificial Sequence
  Quasi-synthetic sequence derived from human genome
RRPGAPASWIWWRMLRQVLRRGLQSFCHRLGLCVSRHPVFFL

SEQ ID NO: 34739 - protein, 42 aa, Artificial Sequence
  Quasi-synthetic sequence derived from human genome
LVSILKLPQWLKGLLAFLVKPLLPRLSAFLSNMKSRSAGKLW

SEQ ID NO: 34740 - protein, 42 aa, Artificial Sequence
  Quasi-synthetic sequence derived from human genome
MGQTKSKIKSKYASYLSFIKILLKRGGVKVSTKNLIKLFQII

SEQ ID NO: 34741 - protein, 42 aa, Artificial Sequence
  Quasi-synthetic sequence derived from human genome
KTWRVHAIFKNVKMKKKIIKDQKLLVIVGGMLLIDLCILICW

SEQ ID NO: 34742 - protein, 42 aa, Artificial Sequence
  Quasi-synthetic sequence derived from human genome
LTKRIKNAAANVLRETWLIYKHTKLLKKIDHAKVRKHQRKFL

SEQ ID NO: 34743 - protein, 42 aa, Artificial Sequence
  Quasi-synthetic sequence derived from human genome
PFLVFLIPFLHFIIFLFTLRCLEWKFGKKSMRKDPFFRISPR

SEQ ID NO: 34744 - protein, 42 aa, Artificial Sequence
  Quasi-synthetic sequence derived from human genome
QTPLAIYNSISYKTFLPKCIRAKIQDYHILTRKRIRYRFRRF

SEQ ID NO: 34745 - protein, 42 aa, Artificial Sequence
  Quasi-synthetic sequence derived from human genome
YYSLSQIKFSPVAKKLFVVTAVSAISVIFLAHHFKRKRGKKK

SEQ ID NO: 34746 - protein, 42 aa, Artificial Sequence
  Quasi-synthetic sequence derived from human genome
YLQRLLLVHGRWSYIRMCKFLRYFFYKNFAFTLVHFWYSFFN

SEQ ID NO: 34747 - protein, 42 aa, Artificial Sequence
  Quasi-synthetic sequence derived from human genome
RSWSLALTWALNYRTGVRLRGAILTMAFKKILKLKNIKEKSL

SEQ ID NO: 34748 - protein, 42 aa, Artificial Sequence
  Quasi-synthetic sequence derived from human genome
LVRHKDVRRIRSLQRSVQVLRAIVVMYVICWLPYHARRLMYC

SEQ ID NO: 34749 - protein, 42 aa, Artificial Sequence
  Quasi-synthetic sequence derived from human genome
VLRPLDTVQRPKGYRKLLALGTWLLALLLTLPVMLAMRLVRR

SEQ ID NO: 34750 - protein, 42 aa, Artificial Sequence
  Quasi-synthetic sequence derived from human genome
LRKSLKIIYLNSIQELEIRNMSWPRLIRKLRCYLKEMKNLRK

SEQ ID NO: 34751 - protein, 42 aa, Artificial Sequence
  Quasi-synthetic sequence derived from human genome
FLKVLTAQDKKEAALRERLKTLRRPRVRDRLPILLQRRMRVK

SEQ ID NO: 34752 - protein, 42 aa, Artificial Sequence
  Quasi-synthetic sequence derived from human genome
KFLRFRRSLLLLVKHSCVESLFLVRNFCILYYFLGYIPKAWI

SEQ ID NO: 34753 - protein, 42 aa, Artificial Sequence
  Quasi-synthetic sequence derived from human genome
KCLYSRITVNTAFGTKFSHISFIILFKVFLFPRITISKKTKL

SEQ ID NO: 34754 - protein, 42 aa, Artificial Sequence
  Quasi-synthetic sequence derived from human genome
RKFKFRKMHYDRFVIFLMPHIGCIVMALSKYLMMFQIYCKVC

SEQ ID NO: 34755 - protein, 42 aa, Artificial Sequence
  Quasi-synthetic sequence derived from human genome
RRWKKKQLRRPSLLLLGCCSFGIMAPSLWKGLVGIGLFALAH

SEQ ID NO: 34756 - protein, 42 aa, Artificial Sequence
  Quasi-synthetic sequence derived from human genome
YRDKLKFWTHCVLATLIMFTIFSFFAEQLIALKRKIFPRRRI

SEQ ID NO: 34757 - protein, 42 aa, Artificial Sequence
  Quasi-synthetic sequence derived from human genome
APLRFYPASPRRLHRASTPGPAWGWLLRRRRWAALLVLGLLV

SEQ ID NO: 34758 - protein, 42 aa, Artificial Sequence
  Quasi-synthetic sequence derived from human genome
VVKMRKEVKRIRVLVIRKLVRSVGRLKSKKGTEDALLKNQRR

SEQ ID NO: 34759 - protein, 42 aa, Artificial Sequence
  Quasi-synthetic sequence derived from human genome
ARMWRIRRRYCQVLNAVRIIQAYWRCRSCASRGFIKGQYRVT

SEQ ID NO: 34760 - protein, 42 aa, Artificial Sequence
  Quasi-synthetic sequence derived from human genome
AGVLLTLLLIAFIFLIIKSYRKYRRERLPISPGPLLRWVPLL

SEQ ID NO: 34761 - protein, 42 aa, Artificial Sequence
  Quasi-synthetic sequence derived from human genome
FGKLIRSVFMGLRTRRLGTRGNSKYHYYGLRIKASSPLLRLM

SEQ ID NO: 34762 - protein, 42 aa, Artificial Sequence
  Quasi-synthetic sequence derived from human genome
VGSVGKVGQVLRVMRLMRIFRILKLARHSTGLRAFGFTLRQC

SEQ ID NO: 34763 - protein, 42 aa, Artificial Sequence
  Quasi-synthetic sequence derived from human genome
IFYLLKIANFSNLLFLHLKRRVRSVILVILLGTLIFLVCHLL

SEQ ID NO: 34764 - protein, 42 aa, Artificial Sequence
  Quasi-synthetic sequence derived from human genome
ARGACRIYNSTYLGRAFFGLKVALIFPVLVLLTVFIFVVRKK

SEQ ID NO: 34765 - protein, 42 aa, Artificial Sequence
  Quasi-synthetic sequence derived from human genome
VARKFASIARNQVRKKRQMAARERKVTRTIFAILLAFILTWT

SEQ ID NO: 34766 - protein, 42 aa, Artificial Sequence
  Quasi-synthetic sequence derived from human genome
RGKNPLLVPLLYDFRRMTARRRVNRKMGFHVIYKTPCGLCLR

SEQ ID NO: 34767 - protein, 42 aa, Artificial Sequence
  Quasi-synthetic sequence derived from human genome
LKNLSLLKLLKSSNRRIQELHKLAKRCWHSLLSVPKILRISS

SEQ ID NO: 34768 - protein, 42 aa, Artificial Sequence
  Quasi-synthetic sequence derived from human genome
VKVSLFTAFFLATIMGVRFKRSKKIMPAGLVAGLSLMMILRL

SEQ ID NO: 34769 - protein, 42 aa, Artificial Sequence
  Quasi-synthetic sequence derived from human genome
VRFVRILRIFKLTRHFVGLRVLGHTLRASTNEFLLLIIFLAL

SEQ ID NO: 34770 - protein, 42 aa, Artificial Sequence
  Quasi-synthetic sequence derived from human genome
ALRRFQGLLLDRRGRLHGQVLRLREVARRLERLRRRSLVANV

SEQ ID NO: 34771 - protein, 42 aa, Artificial Sequence
  Quasi-synthetic sequence derived from human genome
RLPILFAIGVNFLIFVRVICIVVSKLKANLMCKTDIKCRLAK

SEQ ID NO: 34772 - protein, 42 aa, Artificial Sequence
  Quasi-synthetic sequence derived from human genome
FLITFLFGMVVLALVVWKIFTLSRATAVKERGKNRKKVLTLL

SEQ ID NO: 34773 - protein, 42 aa, Artificial Sequence
  Quasi-synthetic sequence derived from human genome
TILGLLLLRWRRPALHRPIKVNLLIPVAYLVFWAFLLVFSFI

SEQ ID NO: 34774 - protein, 42 aa, Artificial Sequence
  Quasi-synthetic sequence derived from human genome
KFFMARVRLQLKIILCFSPVGRTLRVRARKFPAIVNCTAIDW

SEQ ID NO: 34775 - protein, 42 aa, Artificial Sequence
  Quasi-synthetic sequence derived from human genome
MAARGRRAWLSVLLGLVLGFVLASRLVLPRASELKRAGPRRR

SEQ ID NO: 34776 - protein, 42 aa, Artificial Sequence
  Quasi-synthetic sequence derived from human genome
LKKKAFVWARNIGFKVNSKKMLGKYNTPVSYRMAKTLVFSKV

SEQ ID NO: 34777 - protein, 42 aa, Artificial Sequence
  Quasi-synthetic sequence derived from human genome
KFDQKKRVKLAQGLWLMNWFSVLAGIIIFSLGLFLKIELRKR

SEQ ID NO: 34778 - protein, 42 aa, Artificial Sequence
  Quasi-synthetic sequence derived from human genome
LIYLFSKYLAFNTLFALKRMALQRDRKEKTRAWCIFIKLCGR

SEQ ID NO: 34779 - protein, 42 aa, Artificial Sequence
  Quasi-synthetic sequence derived from human genome
RKVSSIGRRYPRKRCICCFLLGLLLAVTATGLAFGTWKHARR

SEQ ID NO: 34780 - protein, 42 aa, Artificial Sequence
  Quasi-synthetic sequence derived from human genome
LQRRERRYLQRRREKLMLARRGITLQKMEMPKQTRHRKLKVL

SEQ ID NO: 34781 - protein, 42 aa, Artificial Sequence
  Quasi-synthetic sequence derived from human genome
RFIKYFVKGRQAVLSMVRKAKYRELLLSELLGRRAPVVVRLG

SEQ ID NO: 34782 - protein, 42 aa, Artificial Sequence
  Quasi-synthetic sequence derived from human genome
LGVCSSGLLVYKDKLRINRFPWPKVLKISYKRSSFFIKIRPG

SEQ ID NO: 34783 - protein, 42 aa, Artificial Sequence
  Quasi-synthetic sequence derived from human genome
LPGFPVSWRTRMRAFHLSLPGGAQLLTYLVKVLKRRTWRRNV

SEQ ID NO: 34784 - protein, 42 aa, Artificial Sequence
  Quasi-synthetic sequence derived from human genome
RRYFREATMKMAVMIFKRGVFESRRKNKAVFRPKIRINLREV

SEQ ID NO: 34785 - protein, 42 aa, Artificial Sequence
  Quasi-synthetic sequence derived from human genome
LRLPQKFLFLLFLSGLVTLCFGALFLLPHSSRLKRLFLAPRT

SEQ ID NO: 34786 - protein, 42 aa, Artificial Sequence
  Quasi-synthetic sequence derived from human genome
LSRKASAVNMEKFKKFAARKKWKQSVRLISLCQRLSRSFLSR

SEQ ID NO: 34787 - protein, 42 aa, Artificial Sequence
  Quasi-synthetic sequence derived from human genome
GTILIILTGRHRGKRVVFLKQLASGLLLVTGPLVLNRVPLRR

SEQ ID NO: 34788 - protein, 42 aa, Artificial Sequence
  Quasi-synthetic sequence derived from human genome
LLKMWEDLRLRVHGPFFPRILRRRKGKREFGKTITHIVAKMM

SEQ ID NO: 34789 - protein, 42 aa, Artificial Sequence
  Quasi-synthetic sequence derived from human genome
RLFSKVLVTIKKVYMKERSFKGVEFGKNLGLKSSLIRKPRIV

SEQ ID NO: 34790 - protein, 42 aa, Artificial Sequence
  Quasi-synthetic sequence derived from human genome
SVSTWLAIILLIFISLFPEILLIVLKNVRRRSARRNLSCRRA

SEQ ID NO: 34791 - protein, 42 aa, Artificial Sequence
  Quasi-synthetic sequence derived from human genome
VGIIAGATIGASILLIFFFIALVFFLYRRRKGSRKDVTLRKL

SEQ ID NO: 34792 - protein, 42 aa, Artificial Sequence
  Quasi-synthetic sequence derived from human genome
ARIVRALFEIALRKRWPTMTYRLLNLSKVIDKRLWGWASPLR

SEQ ID NO: 34793 - protein, 42 aa, Artificial Sequence
  Quasi-synthetic sequence derived from human genome
RALLLWGRRLRPLLRAPALAAVPGGKPILCPRRTTAQLGPRR

SEQ ID NO: 34794 - protein, 42 aa, Artificial Sequence
  Quasi-synthetic sequence derived from human genome
QMHILHISVMGGLIALLLLLLVFTVALYAQRRWQKRRRIPQK

SEQ ID NO: 34795 - protein, 42 aa, Artificial Sequence
  Quasi-synthetic sequence derived from human genome
LILLCMSLLLFQVIRLYQRRRWMIRALHLFPAPPAHWFYGHK

SEQ ID NO: 34796 - protein, 42 aa, Artificial Sequence
  Quasi-synthetic sequence derived from human genome
RYRIVKKTPASPLSAPPFPLSLPSWRARRLSLSRSLVLNRLR

SEQ ID NO: 34797 - protein, 42 aa, Artificial Sequence
  Quasi-synthetic sequence derived from human genome
SFHLLFGLEIRMRRIVFAGVILFRLLGVILFRLLGVILFGRL

SEQ ID NO: 34798 - protein, 42 aa, Artificial Sequence
  Quasi-synthetic sequence derived from human genome
FFRLFRVMRLVKLLSRGEGIRTLLWTFIKSFQALPYVALLIV

SEQ ID NO: 34799 - protein, 42 aa, Artificial Sequence
  Quasi-synthetic sequence derived from human genome
KRILHKTKGKRFTYKFNFNKLVMPNYPFINIRSSGKIQTLLV

SEQ ID NO: 34800 - protein, 42 aa, Artificial Sequence
  Quasi-synthetic sequence derived from human genome
LFCLQYLGVRVLLRFQRKLSVLLLLLGRRRVDFRLVNELLVY

SEQ ID NO: 34801 - protein, 42 aa, Artificial Sequence
  Quasi-synthetic sequence derived from human genome
RGSRGRKNSRTMLLPLLRRFPEQVRVSLFHTPHLRGLLRLLI

SEQ ID NO: 34802 - protein, 42 aa, Artificial Sequence
  Quasi-synthetic sequence derived from human genome
PVIKKIALREIRMLKQLKHPNLVNLLEVFRRKRRLHLVFEYC

SEQ ID NO: 34803 - protein, 42 aa, Artificial Sequence
  Quasi-synthetic sequence derived from human genome
HARWIVGKVIGTKMQKTAKVRVTRLVLDPYLLKYFNKRKTYF

SEQ ID NO: 34804 - protein, 42 aa, Artificial Sequence
  Quasi-synthetic sequence derived from human genome
PLRILSKYHRFISFTLYLIGFCMFVLSLVKKHYRLQFYMFGW

SEQ ID NO: 34805 - protein, 42 aa, Artificial Sequence
  Quasi-synthetic sequence derived from human genome
RRRRRPLQRGKPPYSYIALIAMALAHAPGRRLTLAAIYRFIT

SEQ ID NO: 34806 - protein, 42 aa, Artificial Sequence
  Quasi-synthetic sequence derived from human genome
LKHYYHGFRLLWIDTKIAARMLWRILNGHSLTRRERRQFLRI

SEQ ID NO: 34807 - protein, 42 aa, Artificial Sequence
  Quasi-synthetic sequence derived from human genome
LKPLISMKFLRPLRVLSQFERMKVVVRALIKTTLPTLNVFLV

SEQ ID NO: 34808 - protein, 42 aa, Artificial Sequence
  Quasi-synthetic sequence derived from human genome
YGLVGAGVVLMLIILVALLMLVFRSKREVKRQKYRLSQLYKW

SEQ ID NO: 34809 - protein, 42 aa, Artificial Sequence
  Quasi-synthetic sequence derived from human genome
KRFKVMKPKVLRSWCRQILKGLLFLHTRTPPIIHRDLKCDNI

SEQ ID NO: 34810 - protein, 42 aa, Artificial Sequence
  Quasi-synthetic sequence derived from human genome
KLVSPKWKNFKGLKLQWRDKIRLNNAIWRAWYMQYLEKRKNP

SEQ ID NO: 34811 - protein, 42 aa, Artificial Sequence
  Quasi-synthetic sequence derived from human genome
RYFSVTRPLSYRAKRTPRRAALMIGLAWLVSFVLWAPAILFW

SEQ ID NO: 34812 - protein, 42 aa, Artificial Sequence
  Quasi-synthetic sequence derived from human genome
FRMRKARQYYLKMYKAIIVIQNYYHAYKAQVNQRKNFLQVKK

SEQ ID NO: 34813 - protein, 42 aa, Artificial Sequence
  Quasi-synthetic sequence derived from human genome
PVPTWILVLSLSLAGALFLLAGLVAVALVVRKVKLRNLQKKR

SEQ ID NO: 34814 - protein, 42 aa, Artificial Sequence
  Quasi-synthetic sequence derived from human genome
FRSRLPVPGPRRRNPRTTQHPLALLARVWVLCKGWNWRLARA

SEQ ID NO: 34815 - protein, 42 aa, Artificial Sequence
  Quasi-synthetic sequence derived from human genome
VSFGRRVLCYPLYRHFKLVMKAYRDTIKILQLGKSAVLKCLL

SEQ ID NO: 34816 - protein, 42 aa, Artificial Sequence
  Quasi-synthetic sequence derived from human genome
VLLLLLLGLLRPLRRRSCLLAPGKGPPALGASRGPRRSWAVW

SEQ ID NO: 34817 - protein, 42 aa, Artificial Sequence
  Quasi-synthetic sequence derived from human genome
KSKIFFLFRLCKKLPFNMMSWLNFSIRTEIRNLSVFLALPCK

SEQ ID NO: 34818 - protein, 42 aa, Artificial Sequence
  Quasi-synthetic sequence derived from human genome
KVLFRKSEKYMKLFLWLLVGVGLLGLGLRHKAYERKLGKVAP

SEQ ID NO: 34819 - protein, 42 aa, Artificial Sequence
  Quasi-synthetic sequence derived from human genome
LKKKLFLTLKENEKLRKRLQAQRLVMRRMSSRLRACKGHQGL

SEQ ID NO: 34820 - protein, 42 aa, Artificial Sequence
  Quasi-synthetic sequence derived from human genome
GFLGKTMGKLKILSRGSQTKLLCYMMLFSLFVFFIIYWIIKL

SEQ ID NO: 34821 - protein, 42 aa, Artificial Sequence
  Quasi-synthetic sequence derived from human genome
RPFVSQKLRTKAMARRVLAGIWVLSFLLATPVLAYRTVVPWK

SEQ ID NO: 34822 - protein, 42 aa, Artificial Sequence
  Quasi-synthetic sequence derived from human genome
CRGYLARQHFKKRKIQDLAIRCVQKNIKKNKGVKDWPWWKLF

SEQ ID NO: 34823 - protein, 42 aa, Artificial Sequence
  Quasi-synthetic sequence derived from human genome
KKRWSVLAAAGLRGLVRLLHVRAGFCCGVIRAHKKAIATLCF

SEQ ID NO: 34824 - protein, 42 aa, Artificial Sequence
  Quasi-synthetic sequence derived from human genome
LARSLLVLRLCAWPALLARHEQLLYVSRKLLGQRLFNKLMKM

SEQ ID NO: 34825 - protein, 42 aa, Artificial Sequence
  Quasi-synthetic sequence derived from human genome
FFQKLGYERKLQKPQNPYKPKWVKMRYGAWYLNPKLWKKQRV

SEQ ID NO: 34826 - protein, 42 aa, Artificial Sequence
  Quasi-synthetic sequence derived from human genome
LILKAGRRWNKYFKSRRPLFTGGLIGGLFTYVLFWTFLYGMV

SEQ ID NO: 34827 - protein, 42 aa, Artificial Sequence
  Quasi-synthetic sequence derived from human genome
GAIMSVFPVVMYFWKRFCFWKATRSYLQYRGKKFKDRKSPPK

SEQ ID NO: 34828 - protein, 42 aa, Artificial Sequence
  Quasi-synthetic sequence derived from human genome
FVRACLRRLVPPGLWGSRHNERRFLRNTKKFISLGKHAKLSL

SEQ ID NO: 34829 - protein, 42 aa, Artificial Sequence
  Quasi-synthetic sequence derived from human genome
LKYCSAKARHCWTKERRVLLVMSKAKRKWVSVRPLPSIRNFP

SEQ ID NO: 34830 - protein, 42 aa, Artificial Sequence
  Quasi-synthetic sequence derived from human genome
KRRCAKCGRLDFILMKKMGIKSGFTFWNLVFLLTVSCVKGFI

SEQ ID NO: 34831 - protein, 42 aa, Artificial Sequence
  Quasi-synthetic sequence derived from human genome
KLLTLQPPGMLWLMERGGLGKPRGPRHRGLLRVRLGRFISRL

SEQ ID NO: 34832 - protein, 42 aa, Artificial Sequence
  Quasi-synthetic sequence derived from human genome
RKYLLRLDVRKDHVKFWRPQLLLLVGNPRGALPLLRLANQLK

SEQ ID NO: 34833 - protein, 42 aa, Artificial Sequence
  Quasi-synthetic sequence derived from human genome
RKRSRRVLYPRVVRRQLPVEEPNPAKRLLFLLLTIVFCQILM

SEQ ID NO: 34834 - protein, 42 aa, Artificial Sequence
  Quasi-synthetic sequence derived from human genome
PRPGLRRQWKCVQRRCLRHLAHRLRRRHQRCQRRTPLAVAPP

SEQ ID NO: 34835 - protein, 42 aa, Artificial Sequence
  Quasi-synthetic sequence derived from human genome
RIIWSLRQRQMDRHAKIKRAITFIMVVAIVFVICFLPSVVVR

SEQ ID NO: 34836 - protein, 42 aa, Artificial Sequence
  Quasi-synthetic sequence derived from human genome
VYKTARALRIVRFTKILSLLRLLRLSRLIRYIHQWEEIFHMT

SEQ ID NO: 34837 - protein, 42 aa, Artificial Sequence
  Quasi-synthetic sequence derived from human genome
RKRKRSKRKKEVPFFGRRMHHTCPCLPGLACLRTSFNRFICL

SEQ ID NO: 34838 - protein, 42 aa, Artificial Sequence
  Quasi-synthetic sequence derived from human genome
VFTALAILIMRLKMFLTPHMCVMASLICSRQLFGWLFRRVRF

SEQ ID NO: 34839 - protein, 42 aa, Artificial Sequence
  Quasi-synthetic sequence derived from human genome
LLIVVKVRAAGVRVGCVRRRSERKVTRMVLVVVLVFAGCWLP

SEQ ID NO: 34840 - protein, 42 aa, Artificial Sequence
  Quasi-synthetic sequence derived from human genome
KKSNKVLPMRRVLRKRPSPAPRTIRIEWLKSKSTKAATKFML

SEQ ID NO: 34841 - protein, 42 aa, Artificial Sequence
  Quasi-synthetic sequence derived from human genome
LRKRRRLLSIIVVLVVTFALCWMPYHLVKTLYMLGSLLHWPC

SEQ ID NO: 34842 - protein, 42 aa, Artificial Sequence
  Quasi-synthetic sequence derived from human genome
KLTRKAAYVRYFNSSAFFFSGFFVVFLSVLPYALIKGIILRK

SEQ ID NO: 34843 - protein, 42 aa, Artificial Sequence
  Quasi-synthetic sequence derived from human genome
MFYAYVEMKRKKRVHFHGFMLDVHKRIHRLKQSLPKRKPGFM

SEQ ID NO: 34844 - protein, 42 aa, Artificial Sequence
  Quasi-synthetic sequence derived from human genome
LAVSKFLLAFLVPLAIIASSHAAVSLRLQHRGRRRPGRFVRL

SEQ ID NO: 34845 - protein, 42 aa, Artificial Sequence
  Quasi-synthetic sequence derived from human genome
AGYLTWNYVLNEAIRLSLIMQLVALLLVVLWIRWKCRRLRIR

SEQ ID NO: 34846 - protein, 42 aa, Artificial Sequence
  Quasi-synthetic sequence derived from human genome
LMDMKPPISRAKMILITKAAIKAIKLYKHVVQIVEKFIKKCK

SEQ ID NO: 34847 - protein, 42 aa, Artificial Sequence
  Quasi-synthetic sequence derived from human genome
ALFLGRWLVVRLATKWCQRKLQAELKIGSFRFFWIQNVSLKF

SEQ ID NO: 34848 - protein, 42 aa, Artificial Sequence
  Quasi-synthetic sequence derived from human genome
RRVVQIFRIMRILRILKLARHSTGLQSLGFTLRRSYNELGLL

SEQ ID NO: 34849 - protein, 42 aa, Artificial Sequence
  Quasi-synthetic sequence derived from human genome
SAVILQAAFRGMKTRRHLKSMHSSATLIQSRFRSLLVRRRFI

SEQ ID NO: 34850 - protein, 42 aa, Artificial Sequence
  Quasi-synthetic sequence derived from human genome
LKIYIRKRRPSKPHMFPKILMKITDLRSISAKGAERVITLKM

SEQ ID NO: 34851 - protein, 42 aa, Artificial Sequence
  Quasi-synthetic sequence derived from human genome
ARKAIQRRKWAVRIIRKFIKGFISRNKPLCPDNEEFIVFVRK

SEQ ID NO: 34852 - protein, 42 aa, Artificial Sequence
  Quasi-synthetic sequence derived from human genome
WIILAVAIIVVSVGLGLILYCVCKWQLRRGKKWEIAKPLKHK

SEQ ID NO: 34853 - protein, 42 aa, Artificial Sequence
  Quasi-synthetic sequence derived from human genome
KFQRYQLIMTFHDRPVLPPPMIILSHIYIIIMRLSGRCRKKR

SEQ ID NO: 34854 - protein, 42 aa, Artificial Sequence
  Quasi-synthetic sequence derived from human genome
RGAPSRRRQAGRRLRYLPTGSFPFLLLLLLLCIQLGGGQKKK

SEQ ID NO: 34855 - protein, 42 aa, Artificial Sequence
  Quasi-synthetic sequence derived from human genome
QKGFKIQSKLLKHKQIHTRNKAFRALLLKKRRTESRPLPNKL

SEQ ID NO: 34856 - protein, 42 aa, Artificial Sequence
  Quasi-synthetic sequence derived from human genome
IHLPIYRHLRRFILSVIVFGSIVLLMLWLPIRIIKSVLPNFL

SEQ ID NO: 34857 - protein, 42 aa, Artificial Sequence
  Quasi-synthetic sequence derived from human genome
RSRHIGWCRSCWRVFFFMIILEKKFSFPQCGSLRRMTYLLFL

SEQ ID NO: 34858 - protein, 42 aa, Artificial Sequence
  Quasi-synthetic sequence derived from human genome
KFIKFLNRNAYIMIAIYGKNFCVSAKNAFMLLMRNIVRVVVL

SEQ ID NO: 34859 - protein, 42 aa, Artificial Sequence
  Quasi-synthetic sequence derived from human genome
KIQSSYRRWMIRKRMREMHRAATFIQSTFRMHRLHMRYQALK

SEQ ID NO: 34860 - protein, 42 aa, Artificial Sequence
  Quasi-synthetic sequence derived from human genome
RRRIRLWHRGAMVIQATWRGYRVRRNLAHLCRATTTIQSAWR

SEQ ID NO: 34861 - protein, 42 aa, Artificial Sequence
  Quasi-synthetic sequence derived from human genome
IVLCKHKGITSGRAQLLWFLQTFFFGIASLTILIAYKRKRQK

SEQ ID NO: 34862 - protein, 42 aa, Artificial Sequence
  Quasi-synthetic sequence derived from human genome
WVLWSAVKSRWVIVGLFVSILILSLVFASRLRPASRAPLLFR

SEQ ID NO: 34863 - protein, 42 aa, Artificial Sequence
  Quasi-synthetic sequence derived from human genome
PLRRGRPKRRRKPQPHSGSVLALPLRSRKIRKQLRSVVSRMA

SEQ ID NO: 34864 - protein, 42 aa, Artificial Sequence
  Quasi-synthetic sequence derived from human genome
LRKRRYHAALAVLKGFRNGAVYGAKIRAPHALVMTFLFRNGR

SEQ ID NO: 34865 - protein, 42 aa, Artificial Sequence
  Quasi-synthetic sequence derived from human genome
MAKLWFKFQRYFRRKPVRFFTFLALYLTAGSLVFLHSGFVGQ

SEQ ID NO: 34866 - protein, 42 aa, Artificial Sequence
  Quasi-synthetic sequence derived from human genome
VLIIAKMRMVALKAGWQQRKRSERKITLMVMMVVMVFVICWM

SEQ ID NO: 34867 - protein, 42 aa, Artificial Sequence
  Quasi-synthetic sequence derived from human genome
RLGIHLIRRKIVKPKHHVLMSRKESWKVKSEIPKVPKQPLVL

SEQ ID NO: 34868 - protein, 42 aa, Artificial Sequence
  Quasi-synthetic sequence derived from human genome
ARRQEQRATVRALWFWAFSLQAKVWATWLAFVLERRRKKARL

SEQ ID NO: 34869 - protein, 42 aa, Artificial Sequence
  Quasi-synthetic sequence derived from human genome
RLFRFPYYLSRHRLSHSGLRPHACPLCPKAFRRPAHLSRHLR

SEQ ID NO: 34870 - protein, 42 aa, Artificial Sequence
  Quasi-synthetic sequence derived from human genome
LIICILITGLGIISVISHLTKRRRSQRNRRVGNTLKPFSRVL

SEQ ID NO: 34871 - protein, 42 aa, Artificial Sequence
  Quasi-synthetic sequence derived from human genome
RPSLQWYTRAQSKMRRPSLLLKDILKCTLLVFGVWILYILKL

SEQ ID NO: 34872 - protein, 42 aa, Artificial Sequence
  Quasi-synthetic sequence derived from human genome
RLRVQQAALRAARLRHQELFRLRGIKAQVALRLAELARRQRR

SEQ ID NO: 34873 - protein, 42 aa, Artificial Sequence
  Quasi-synthetic sequence derived from human genome
LWRKKQSDVMRFLLRVRCWQYRQLSALHRAPRPTRPDKARRL

SEQ ID NO: 34874 - protein, 42 aa, Artificial Sequence
  Quasi-synthetic sequence derived from human genome
CKNRYDKDKPVSFHKKKIFWSHRNSFPHLLYRLLFPRLMLLL

SEQ ID NO: 34875 - protein, 42 aa, Artificial Sequence
  Quasi-synthetic sequence derived from human genome
EMRKLFIQRAKKIDKISRIGFPMAFLIFNMFYWIIYKIVRRE

SEQ ID NO: 34876 - protein, 42 aa, Artificial Sequence
  Quasi-synthetic sequence derived from human genome
EEMRKLFIQRAKKIDKISRIGFPMAFLIFNMFYWIIYKIVRR

SEQ ID NO: 34877 - protein, 42 aa, Artificial Sequence
  Quasi-synthetic sequence derived from human genome
RKYRATICAKHKLYQFLHLRKAAITIQSSYRRLMVKKKLQEM

SEQ ID NO: 34878 - protein, 42 aa, Artificial Sequence
  Quasi-synthetic sequence derived from human genome
KRKFKSLLLHKRTAIQHAYRLLISQRRPAGISYRQFEGLMRF

SEQ ID NO: 34879 - protein, 42 aa, Artificial Sequence
  Quasi-synthetic sequence derived from human genome
RKLFQEIFTALVKNRLISREWVNRAPSIHFLRVLICLRLLMR

SEQ ID NO: 34880 - protein, 42 aa, Artificial Sequence
  Quasi-synthetic sequence derived from human genome
MVCRPVFPCRRRFCPRPFLVGLVVAICLFYQTLTLRGSRKLT

SEQ ID NO: 34881 - protein, 42 aa, Artificial Sequence
  Quasi-synthetic sequence derived from human genome
IHRLRRRGRSGLQPRVGKSTAILLGITTLFTLLWAPRVFVML

SEQ ID NO: 34882 - protein, 42 aa, Artificial Sequence
  Quasi-synthetic sequence derived from human genome
MFLTALLWRGRIPGRQWIGKHRRPRFVSLRAKQNMIRRLEIE

SEQ ID NO: 34883 - protein, 42 aa, Artificial Sequence
  Quasi-synthetic sequence derived from human genome
RLFDYRGRLSPVPVPRAVPVKRPRVTVPLVRRVKTNVPVKLF

SEQ ID NO: 34884 - protein, 42 aa, Artificial Sequence
  Quasi-synthetic sequence derived from human genome
LAQRKLLMLKKEKLEKVQNKAASLIQGYWRRYSTRQRFLKLK

SEQ ID NO: 34885 - protein, 42 aa, Artificial Sequence
  Quasi-synthetic sequence derived from human genome
RSLLQSLSRLQKPRAFILKSKGIKQKQIIPKNLLDSKSLKLI

SEQ ID NO: 34886 - protein, 42 aa, Artificial Sequence
  Quasi-synthetic sequence derived from human genome
FKQGAPKPRLNQLYERALKLLPCSYKLWYRYLKARRAQVKHR

SEQ ID NO: 34887 - protein, 42 aa, Artificial Sequence
  Quasi-synthetic sequence derived from human genome
LLGWSWLRRRRARGIPPGPTPWPLVGNFGHVLLPPFLRRRSW

SEQ ID NO: 34888 - protein, 42 aa, Artificial Sequence
  Quasi-synthetic sequence derived from human genome
RAHRHRGLRPRRQKALRMILAVVLVFFVCWLPENVFISVHLL

SEQ ID NO: 34889 - protein, 42 aa, Artificial Sequence
  Quasi-synthetic sequence derived from human genome
GPVLFWVILVLVVVVGSSAFLLCHRRACRKRIRQKLHLCYPV

SEQ ID NO: 34890 - protein, 42 aa, Artificial Sequence
  Quasi-synthetic sequence derived from human genome
IRSLRQGLRVEKRLKTKAVRMIAIVLAIFLVCFVPYHVNRSV

SEQ ID NO: 34891 - protein, 42 aa, Artificial Sequence
  Quasi-synthetic sequence derived from human genome
ARGKFVSLFYTVVTPALNPLIYTLRNKKVKGAARRLLRSLGR

SEQ ID NO: 34892 - protein, 42 aa, Artificial Sequence
  Quasi-synthetic sequence derived from human genome
FVRKLSGLLILLVLFAIGYFLQRIICPSPRRYPRGQARPGQR

SEQ ID NO: 34893 - protein, 42 aa, Artificial Sequence
  Quasi-synthetic sequence derived from human genome
RLGRRLGRRRRPRSPPEPLRVRARLRLRSPSGAFAALGALVV

SEQ ID NO: 34894 - protein, 42 aa, Artificial Sequence
  Quasi-synthetic sequence derived from human genome
PPRPLAHLCRLRVRKAIGKYRIKLLDTLPLPGRLIRYLKYEN

SEQ ID NO: 34895 - protein, 42 aa, Artificial Sequence
  Quasi-synthetic sequence derived from human genome
WTSLTRKGIVRVVFFPFFFRWWLQVTSKVIFFWLLVLYLLQV

SEQ ID NO: 34896 - protein, 42 aa, Artificial Sequence
  Quasi-synthetic sequence derived from human genome
PLFLKLFICFIFIRSSPTIVSNKRVSKRKFIPPAFTNVSTKF

SEQ ID NO: 34897 - protein, 42 aa, Artificial Sequence
  Quasi-synthetic sequence derived from human genome
LKVARALTLLRFELLPDPTRIPIPMARLVLKSKNGIHLRLRR

SEQ ID NO: 34898 - protein, 42 aa, Artificial Sequence
  Quasi-synthetic sequence derived from human genome
WNLKKGVFNKSRCTICSKLAEVWIFIPKLLFRLTVIILTFKC

SEQ ID NO: 34899 - protein, 42 aa, Artificial Sequence
  Quasi-synthetic sequence derived from human genome
VVRKPLNKEGKKPRTKAPKIQRLVTPRVLQHKRRRIALKKQR

SEQ ID NO: 34900 - protein, 42 aa, Artificial Sequence
  Quasi-synthetic sequence derived from human genome
LKMNISVLVLPLFIFTFLYVQMRKTLRFREQRYSLFKLVFAI

SEQ ID NO: 34901 - protein, 42 aa, Artificial Sequence
  Quasi-synthetic sequence derived from human genome
HRMWGRLVGLVYILPAAYFWRKGWLSRGMKGRVLALCGLVCF

SEQ ID NO: 34902 - protein, 42 aa, Artificial Sequence
  Quasi-synthetic sequence derived from human genome
LLRLLAAAAACGAFAFLGYCIYLNRKRRGDPAFKRRLRDKRR

SEQ ID NO: 34903 - protein, 42 aa, Artificial Sequence
  Quasi-synthetic sequence derived from human genome
IIKMTRILTAFKVVRTLKTGFGFTNVTAHQKWKFSRPGIRLL

SEQ ID NO: 34904 - protein, 42 aa, Artificial Sequence
  Quasi-synthetic sequence derived from human genome
WLIYKNTKLVKKIDHAKVRKHQRKFLQAIHQLRSVKMEQRKL

SEQ ID NO: 34905 - protein, 42 aa, Artificial Sequence
  Quasi-synthetic sequence derived from human genome
RQALLAGLFASLGLVALLAALVCNTLSGLALLRARWRRRSRR

SEQ ID NO: 34906 - protein, 42 aa, Artificial Sequence
  Quasi-synthetic sequence derived from human genome
VRAVRPKVLMRLSKTKKHVSRAYGGSMCAKCVRDRIKRAFLI

SEQ ID NO: 34907 - protein, 42 aa, Artificial Sequence
  Quasi-synthetic sequence derived from human genome
KFSMKRLTAGLIAVIVVVVVALVAGMAVLVITNRRKSGKYKK

SEQ ID NO: 34908 - protein, 42 aa, Artificial Sequence
  Quasi-synthetic sequence derived from human genome
RRSVQISVLLPAVNIRRRIKLTFPQPARPRAPRSLCLWQTWF

SEQ ID NO: 34909 - protein, 42 aa, Artificial Sequence
  Quasi-synthetic sequence derived from human genome
PRLVYKWFLLIYKLSYAFGVVGYLAIMFTMCGFNLFFKIKAR

SEQ ID NO: 34910 - protein, 42 aa, Artificial Sequence
  Quasi-synthetic sequence derived from human genome
FNSCLNPIIYPCSSKEFKRAFVRILGCQCRGRGRRRRRRRRR

SEQ ID NO: 34911 - protein, 42 aa, Artificial Sequence
  Quasi-synthetic sequence derived from human genome
ARSVPRTLLCLCRVAVRRALGKHRLHLIPSLPLPDPIKKFLL

SEQ ID NO: 34912 - protein, 42 aa, Artificial Sequence
  Quasi-synthetic sequence derived from human genome
LVFDAFVIVICLASLILCTRSIVLALRLRKRFLNFFLEKYKR

SEQ ID NO: 34913 - protein, 42 aa, Artificial Sequence
  Quasi-synthetic sequence derived from human genome
KNLRRRKAHFQYLLNHRLQILSPVLPVSCRDPRHLRRLRDKL

SEQ ID NO: 34914 - protein, 42 aa, Artificial Sequence
  Quasi-synthetic sequence derived from human genome
KWMLTRKQFGLLSLFFAVLHAIYTLSYAMRRSYRYKLLNWAY

SEQ ID NO: 34915 - protein, 42 aa, Artificial Sequence
  Quasi-synthetic sequence derived from human genome
TRNLVLKNRSLKLQKMKYRPPKTKFFFTVIPQPIFLSPGITL

SEQ ID NO: 34916 - protein, 42 aa, Artificial Sequence
  Quasi-synthetic sequence derived from human genome
IFVFFRKLTTIFPLNWKYRKALSLGCQRVTLHKNMFLTYILN

SEQ ID NO: 34917 - protein, 42 aa, Artificial Sequence
  Quasi-synthetic sequence derived from human genome
IRSSVIIIQARSKGFIQKRKFQEIKNSTIKIQAMWRRYRAKK

SEQ ID NO: 34918 - protein, 42 aa, Artificial Sequence
  Quasi-synthetic sequence derived from human genome
LRAPTLKRRLECSLKVYLYCSPVTKELLLTSPKYRFWKKRII

SEQ ID NO: 34919 - protein, 42 aa, Artificial Sequence
  Quasi-synthetic sequence derived from human genome
LLRLYLVPRAVLLRSGVLLNASYRSIGALNQVRFRHWFVAKL

SEQ ID NO: 34920 - protein, 42 aa, Artificial Sequence
  Quasi-synthetic sequence derived from human genome
KFKVIALTVLASVRIYYQYRRVKPVTREIVIRDPYALRPLRR

SEQ ID NO: 34921 - protein, 42 aa, Artificial Sequence
  Quasi-synthetic sequence derived from human genome
LRCVRLLRIFKITRYWNSLSNLVASLLNSVRSIASLLLLLFL

SEQ ID NO: 34922 - protein, 42 aa, Artificial Sequence
  Quasi-synthetic sequence derived from human genome
FRFKVLILAYAVCRLRHWWAIALTTAVTSAFLLAKVILSKLF

SEQ ID NO: 34923 - protein, 42 aa, Artificial Sequence
  Quasi-synthetic sequence derived from human genome
RYFSITRPLTYRAKRTPKRAGIMIGLAWLISFILWAPAILCW

SEQ ID NO: 34924 - protein, 42 aa, Artificial Sequence
  Quasi-synthetic sequence derived from human genome
RVQRRPLKNRTDFLVPLLSSVLTVAWICCLVTAFYWCLRKRR

SEQ ID NO: 34925 - protein, 42 aa, Artificial Sequence
  Quasi-synthetic sequence derived from human genome
FRQRIILRVWWSTWRQRLGQVRVSRALHASALKHRALSLQVQ

SEQ ID NO: 34926 - protein, 42 aa, Artificial Sequence
  Quasi-synthetic sequence derived from human genome
PRKRYRRKLKKYGKNVGKVIIKGCRYVVIGLQGFAAAYSAPF

SEQ ID NO: 34927 - protein, 42 aa, Artificial Sequence
  Quasi-synthetic sequence derived from human genome
AVHRGIRYLLYRAQRAIRLRHALRLHPQLHRAPIRTWSPHVV

SEQ ID NO: 34928 - protein, 42 aa, Artificial Sequence
  Quasi-synthetic sequence derived from human genome
RGYRQRKIYLEWLQYFKANLDAIIKIQAWARMWAARRQYLRR

SEQ ID NO: 34929 - protein, 42 aa, Artificial Sequence
  Quasi-synthetic sequence derived from human genome
YLTILKAVKVLQASFRGVRVRRTLRKMQTAATLIQSNYRRYR

SEQ ID NO: 34930 - protein, 42 aa, Artificial Sequence
  Quasi-synthetic sequence derived from human genome
NALLRKRRYHAALAVLKGFRNGAVYGAKIRAPHALVMTFLFR

SEQ ID NO: 34931 - protein, 42 aa, Artificial Sequence
  Quasi-synthetic sequence derived from human genome
FNRYLTRRRRIEIANALCLTERQIKIWFQNRRMKWKKENKLI

SEQ ID NO: 34932 - protein, 42 aa, Artificial Sequence
  Quasi-synthetic sequence derived from human genome
RDRQRLRFGPRRALAALVRRGWRCGYLECSAKYNWHVLRLFR

SEQ ID NO: 34933 - protein, 42 aa, Artificial Sequence
  Quasi-synthetic sequence derived from human genome
RRLRAIYTIMRWFRRHKVRAHLAELQRRFQAARQPPLYGRDL

SEQ ID NO: 34934 - protein, 42 aa, Artificial Sequence
  Quasi-synthetic sequence derived from human genome
ARGAPRGSRRPGRTPKWRLPRISARAPYRLRRLRRHTYWPPR

SEQ ID NO: 34935 - protein, 42 aa, Artificial Sequence
  Quasi-synthetic sequence derived from human genome
IPWITAVLPTVIICVMVFCLILWKWKKKKRPRNSYKCGTNTM

SEQ ID NO: 34936 - protein, 42 aa, Artificial Sequence
  Quasi-synthetic sequence derived from human genome
RAKLLAKNRQTFLLQTTKLTRLARRMCRDLLQPRRAARRPYA

SEQ ID NO: 34937 - protein, 42 aa, Artificial Sequence
  Quasi-synthetic sequence derived from human genome
ILMLARRKERLPLYLRLLQRMEHSKKYPGFLLNNFHNLLRFW

SEQ ID NO: 34938 - protein, 42 aa, Artificial Sequence
  Quasi-synthetic sequence derived from human genome
WKYHKTKVASYWLIKLDSVKQRKVLDIVKTSIRTVLPRIWKV

SEQ ID NO: 34939 - protein, 42 aa, Artificial Sequence
  Quasi-synthetic sequence derived from human genome
KITVYRRSSLYIILSTGGIFLLVTLVTVCACWKPSKRKQKKL

SEQ ID NO: 34940 - protein, 42 aa, Artificial Sequence
  Quasi-synthetic sequence derived from human genome
FQQATKIKKLRAGKLSPLKSKFKTGKLQIGRKGVQIVRRRGR

SEQ ID NO: 34941 - protein, 42 aa, Artificial Sequence
  Quasi-synthetic sequence derived from human genome
RARLKTVKFHARTGMIESNRSIKTKRKKSFRLSRKFPFYKSK

SEQ ID NO: 34942 - protein, 42 aa, Artificial Sequence
  Quasi-synthetic sequence derived from human genome
FDRLLPAQIEKWKLKQKKKLERKKLIKDMKAKIRVDTIAKRR

SEQ ID NO: 34943 - protein, 42 aa, Artificial Sequence
  Quasi-synthetic sequence derived from human genome
YKVGIYGWRKRCLYFFVLLLMILILVNLAMTIWILKVMNFTI

SEQ ID NO: 34944 - protein, 42 aa, Artificial Sequence
  Quasi-synthetic sequence derived from human genome
MVLKTLTKPVTLSRSKINKTKVLKMIFVHLIIFCFCFVPYNI

SEQ ID NO: 34945 - protein, 42 aa, Artificial Sequence
  Quasi-synthetic sequence derived from human genome
WKKYYEIVMLCGLLKMWEDLRLRVHGPFFPRILRRRKGKREF

SEQ ID NO: 34946 - protein, 42 aa, Artificial Sequence
  Quasi-synthetic sequence derived from human genome
KKIKIFFALAPVVTVKYTQSPMKKLTTLSRRVVKVLFGDKMF

SEQ ID NO: 34947 - protein, 42 aa, Artificial Sequence
  Quasi-synthetic sequence derived from human genome
KGFFRRAMKRNARLRCPFRKGACEITRKTRRQCQACRLRKCL

SEQ ID NO: 34948 - protein, 42 aa, Artificial Sequence
  Quasi-synthetic sequence derived from human genome
VKAIAIVIPCILALCLLVLVYTVFQFKRKGTPRHILYCKRSM

SEQ ID NO: 34949 - protein, 42 aa, Artificial Sequence
  Quasi-synthetic sequence derived from human genome
IAIVAVLLVLTCCFCICKKCLFKKKNKKKGKEKGGKNAINMK

SEQ ID NO: 34950 - protein, 42 aa, Artificial Sequence
  Quasi-synthetic sequence derived from human genome
YLKSNWLGLRFLRALRLLELPQILQILRAIKTSNSVKFSKLL

SEQ ID NO: 34951 - protein, 42 aa, Artificial Sequence
  Quasi-synthetic sequence derived from human genome
LIARYIKLRTGKTRTRKQVSSHIQVLARRKAREIQAKLKFWQ

SEQ ID NO: 34952 - protein, 42 aa, Artificial Sequence
  Quasi-synthetic sequence derived from human genome
VKPLRKPRIPMETFRKVGIPIIIALLSLASIIIVVVLIKVIL

SEQ ID NO: 34953 - protein, 42 aa, Artificial Sequence
  Quasi-synthetic sequence derived from human genome
IKAFPFYNTVCILRKLFSHNMTRLRKFMVYFGKNQSLQKIQK

SEQ ID NO: 34954 - protein, 42 aa, Artificial Sequence
  Quasi-synthetic sequence derived from human genome
RCAHPLATLFKILASFYISLVIFYGLICMYTLWWMLRRSLKK

SEQ ID NO: 34955 - protein, 42 aa, Artificial Sequence
  Quasi-synthetic sequence derived from human genome
PILYTLTTNFFKDKLKQLLHKHQRKSIFKIKKKSLSTSIVWI

SEQ ID NO: 34956 - protein, 42 aa, Artificial Sequence
  Quasi-synthetic sequence derived from human genome
IFYLLKIANFSNFIFLHLKRRVKSVILVMLLGPLLFLACHLF

SEQ ID NO: 34957 - protein, 42 aa, Artificial Sequence
  Quasi-synthetic sequence derived from human genome
INKKTFIVMNKGKAIFRFSATSALYILTPLNPVRKIAIKILV

SEQ ID NO: 34958 - protein, 42 aa, Artificial Sequence
  Quasi-synthetic sequence derived from human genome
AIVAKQVLLGRKVVVVRCEGINISGNFYRNKLKYLAFLRKRM

SEQ ID NO: 34959 - protein, 42 aa, Artificial Sequence
  Quasi-synthetic sequence derived from human genome
VVHWYFKLLDKNSSGDIGKKEIKPFKRFLRKKSKPKKCVKKF

SEQ ID NO: 34960 - protein, 42 aa, Artificial Sequence
  Quasi-synthetic sequence derived from human genome
AGKHERIKYIEFKKSTVILQALVRGWLVRKRFLEQRAKIRLL

SEQ ID NO: 34961 - protein, 42 aa, Artificial Sequence
  Quasi-synthetic sequence derived from human genome
LIHRLSLMKTSAIKKIRNPKGPLILRLGAAPVTQPTRRVFPR

SEQ ID NO: 34962 - protein, 42 aa, Artificial Sequence
  Quasi-synthetic sequence derived from human genome
RSLKLQKMKYRPPKTKFFFTVIPQPIFLSPGITLTLPIVFRP

SEQ ID NO: 34963 - protein, 42 aa, Artificial Sequence
  Quasi-synthetic sequence derived from human genome
RRAAVLIQKYYRSYKKCGKRRQARRTAVIVQQKLRSSLLTKK

SEQ ID NO: 34964 - protein, 42 aa, Artificial Sequence
  Quasi-synthetic sequence derived from human genome
LPRVFKLFRALGLRHLVVVDNRNQVVGLVTRKDLARYRLGKR

SEQ ID NO: 34965 - protein, 42 aa, Artificial Sequence
  Quasi-synthetic sequence derived from human genome
RLVALKKFVAVLAKYFPGRPLVQNFLHSVNEWLKRQKRNKIP

SEQ ID NO: 34966 - protein, 42 aa, Artificial Sequence
  Quasi-synthetic sequence derived from human genome
LNSKAKLHAALYERKLLSLEVRKRRRRSSRLRAMRPKYPVIT

SEQ ID NO: 34967 - protein, 42 aa, Artificial Sequence
  Quasi-synthetic sequence derived from human genome
RLRALVVIPIIFGILFAILLVLVFIKKVAKKPTNKAPHPKQE

SEQ ID NO: 34968 - protein, 42 aa, Artificial Sequence
  Quasi-synthetic sequence derived from human genome
LNPFKKIKDHLLLIKKVTWTMNGLMLPTDIKRRKTKPVLSIR

SEQ ID NO: 34969 - protein, 42 aa, Artificial Sequence
  Quasi-synthetic sequence derived from human genome
ILLIILFSQYLRNLTFLLPVYRWGKGLTLLRIQIFKMFPIML

SEQ ID NO: 34970 - protein, 42 aa, Artificial Sequence
  Quasi-synthetic sequence derived from human genome
IIIQRKWRAILPAKIAHEHFLMIKRHRAACLIQAHYRGYKGR

SEQ ID NO: 34971 - protein, 42 aa, Artificial Sequence
  Quasi-synthetic sequence derived from human genome
RGIIRFVIGFSLPMSIVAICYGLIAAKIHKKGMIKSSRPLRV

SEQ ID NO: 34972 - protein, 42 aa, Artificial Sequence
  Quasi-synthetic sequence derived from human genome
VWRVLHALLCLHRTLTSWLRVRFGTWNWIWRRCCRAASAAVL

SEQ ID NO: 34973 - protein, 42 aa, Artificial Sequence
  Quasi-synthetic sequence derived from human genome
RKLKINPKRYKGNFLQSCVQLRASRLRTPTWVRRRSRHPPAL

SEQ ID NO: 34974 - protein, 42 aa, Artificial Sequence
  Quasi-synthetic sequence derived from human genome
RLKVFDGIPPPYDKKKRMVVPAALKVVRLKPTRKFAYLGRLA

SEQ ID NO: 34975 - protein, 42 aa, Artificial Sequence
  Quasi-synthetic sequence derived from human genome
KEVKPKIPKGVSRKLDRLAYIAHPKLGKRARARIAKGLRLCR

SEQ ID NO: 34976 - protein, 42 aa, Artificial Sequence
  Quasi-synthetic sequence derived from human genome
RGAPRLLSRVQPRAPCLRRLWGRGARPEVAGRRRAWAWGWRR

SEQ ID NO: 34977 - protein, 42 aa, Artificial Sequence
  Quasi-synthetic sequence derived from human genome
RFRRSRSPMHYMYRPRSRSPRICHRFISRYRSRSRSRSPYRI

SEQ ID NO: 34978 - protein, 42 aa, Artificial Sequence
  Quasi-synthetic sequence derived from human genome
LITDYRHWQIPLGRRFRSLKMWFVFRMYGVKGLQAYIRKHVQ

SEQ ID NO: 34979 - protein, 42 aa, Artificial Sequence
  Quasi-synthetic sequence derived from human genome
RLLQAAPAAAPRALLPQWPRRPGRRWPASPLGMKVFRRKALV

SEQ ID NO: 34980 - protein, 42 aa, Artificial Sequence
  Quasi-synthetic sequence derived from human genome
KFFIDRIRRQLKVTLCFSPVGNKLRVRSRKFPAIVNCTAIHW

SEQ ID NO: 34981 - protein, 42 aa, Artificial Sequence
  Quasi-synthetic sequence derived from human genome
FWVKVASCWACVLLYLGLLLAPLCWPPTQKPQPLILRRRRHR

SEQ ID NO: 34982 - protein, 42 aa, Artificial Sequence
  Quasi-synthetic sequence derived from human genome
ARTLMKMPNIKISRPLKVLLTVVIVFIVTQLPYNIVKFCRAI

SEQ ID NO: 34983 - protein, 42 aa, Artificial Sequence
  Quasi-synthetic sequence derived from human genome
INKKTFIVLNKGKAISRFSATPALYILTPFNPIRKLAIKILV

SEQ ID NO: 34984 - protein, 42 aa, Artificial Sequence
  Quasi-synthetic sequence derived from human genome
SALTRSFYVILGFCGLTALYFLIRAFRLKKPQRRRYGLLANT

SEQ ID NO: 34985 - protein, 42 aa, Artificial Sequence
  Quasi-synthetic sequence derived from human genome
KRFKVMKIKVLRSWCRQILKGLQFLHTRTPPIIHRDLKCDNI

SEQ ID NO: 34986 - protein, 42 aa, Artificial Sequence
  Quasi-synthetic sequence derived from human genome
LTQKTFVVLNRGKTLFRFSATPALYILSPFNLIRRIAIKILI

SEQ ID NO: 34987 - protein, 42 aa, Artificial Sequence
  Quasi-synthetic sequence derived from human genome
RYFHWKMNLCVILLILVFMVPFYIGYFIVSNIRLLHKQRLLF

SEQ ID NO: 34988 - protein, 42 aa, Artificial Sequence
  Quasi-synthetic sequence derived from human genome
SIEWKTLQKKKQQKIKEKLRIRTKAAVKIQAWWRGTLVRRTL

SEQ ID NO: 34989 - protein, 42 aa, Artificial Sequence
  Quasi-synthetic sequence derived from human genome
MRYPIWLITPQTYLIIWVITNCVSTMLLLWTFLLQRRFVKKR

SEQ ID NO: 34990 - protein, 42 aa, Artificial Sequence
  Quasi-synthetic sequence derived from human genome
KVLLAKRKLDGKFYAVKVLQKKIVLNRKEQKHIMAERNVLLK

SEQ ID NO: 34991 - protein, 42 aa, Artificial Sequence
  Quasi-synthetic sequence derived from human genome
RCLPTPKCHTPPLYRMRIFAPNHVVAKSRFWYFVSQLKKMKK

SEQ ID NO: 34992 - protein, 42 aa, Artificial Sequence
  Quasi-synthetic sequence derived from human genome
IRGRILSGVVTKMKMQRTIVIRRDYLHYIRKYNRFEKRHKNM

SEQ ID NO: 34993 - protein, 42 aa, Artificial Sequence
  Quasi-synthetic sequence derived from human genome
HLRRNLHFPLFPHTRTTVKKLAVSPKWKNYGLRIFGFIHPAR

SEQ ID NO: 34994 - protein, 42 aa, Artificial Sequence
  Quasi-synthetic sequence derived from human genome
RLRQKVAVKKLSRPFQSLIHARRTYRELRLLKHLKHENVIGL

SEQ ID NO: 34995 - protein, 42 aa, Artificial Sequence
  Quasi-synthetic sequence derived from human genome
FKRLILFRPFGPIMKVKNEKLNMANTLINVIVPLAKRVDKFR

SEQ ID NO: 34996 - protein, 42 aa, Artificial Sequence
  Quasi-synthetic sequence derived from human genome
RRQRRRQDSRVVARSVRILVASFFLCWFPNHVVTLWGVLVKF

SEQ ID NO: 34997 - protein, 42 aa, Artificial Sequence
  Quasi-synthetic sequence derived from human genome
RKHYLHLRATVVSIQRRYRKLTAVRTQAVICIQSYYRGFKVR

SEQ ID NO: 34998 - protein, 42 aa, Artificial Sequence
  Quasi-synthetic sequence derived from human genome
FFRLFRVMRLVKLLSKGEGIRTLLWTFIKSFQALPYVALLIA

SEQ ID NO: 34999 - protein, 42 aa, Artificial Sequence
  Quasi-synthetic sequence derived from human genome
TRNPVFPRFIKIIEVKNKKLVELLRRKVRLAQPYVGVFLKRD

SEQ ID NO: 35000 - protein, 42 aa, Artificial Sequence
  Quasi-synthetic sequence derived from human genome
LQFIPFFKYCLLRKSFTCWKKNVRLQGLHRLQKFLENHLLLA

SEQ ID NO: 35001 - protein, 43 aa, Artificial Sequence
  Quasi-synthetic sequence derived from human genome
AKGLLIFLLLVILAMGLWVIRVQKRHKMPRMKKLMRNRMKLRK

SEQ ID NO: 35002 - protein, 43 aa, Artificial Sequence
  Quasi-synthetic sequence derived from human genome
RARLIPIIVLLLQKAWRGTLARWRCRRLRAIYTIMRWFRRHKV

SEQ ID NO: 35003 - protein, 43 aa, Artificial Sequence
  Quasi-synthetic sequence derived from human genome
KIKVRFSFFLQIYLIMIFLGLYINFRHLYKQRRRRYGQKKKKI

SEQ ID NO: 35004 - protein, 43 aa, Artificial Sequence
  Quasi-synthetic sequence derived from human genome
KLLRNIPRWTHLLRLLRLIILLRIFHLFHQKRQLEKLIRRRVS

SEQ ID NO: 35005 - protein, 43 aa, Artificial Sequence
  Quasi-synthetic sequence derived from human genome
KKKKKRYLRASSNRNFLLTMRPFLKRAILVLSYVLVILYFRLW

SEQ ID NO: 35006 - protein, 43 aa, Artificial Sequence
  Quasi-synthetic sequence derived from human genome
SGPPPKRKKKKKFCYLCILLLIVLFILLCCLYRLCKKSKPIKK

SEQ ID NO: 35007 - protein, 43 aa, Artificial Sequence
  Quasi-synthetic sequence derived from human genome
FRGKKARRHLKMMHIAATLIQRRFRTLMMRRRFLSLKKTAILI

SEQ ID NO: 35008 - protein, 43 aa, Artificial Sequence
  Quasi-synthetic sequence derived from human genome
KTAFRIYAVSTLLLFLLFFLFRLLLRFLRLCRSFYITCRRLRC

SEQ ID NO: 35009 - protein, 43 aa, Artificial Sequence
  Quasi-synthetic sequence derived from human genome
KRFLKHAGKWSLRWFLSPRWILQFRRWARKWSRFTRSSFQVRW

SEQ ID NO: 35010 - protein, 43 aa, Artificial Sequence
  Quasi-synthetic sequence derived from human genome
FLYGKNRSRIPLLRKRWFQLGRSMNPRARKKRSRIPLLRKRRF

SEQ ID NO: 35011 - protein, 43 aa, Artificial Sequence
  Quasi-synthetic sequence derived from human genome
KLLVHSLNLLAKQGLRLLRGLRRRNVQKKVALAKKLLAKLRFL

SEQ ID NO: 35012 - protein, 43 aa, Artificial Sequence
  Quasi-synthetic sequence derived from human genome
RIFKRKKRIKRRALLFLSYILTHFIFLALLLILIVLLRHTDCF

SEQ ID NO: 35013 - protein, 43 aa, Artificial Sequence
  Quasi-synthetic sequence derived from human genome
RTGRRKSWRLEFLFLRRRCFLLTFYLWFLFFSRFLLMLFLPLL

SEQ ID NO: 35014 - protein, 43 aa, Artificial Sequence
  Quasi-synthetic sequence derived from human genome
CRSTWLRVRKARPQLILSRRPRRRLGSLRWCGRRRLRWRLLQA

SEQ ID NO: 35015 - protein, 43 aa, Artificial Sequence
  Quasi-synthetic sequence derived from human genome
VIRAHVLGFLARKQYRKVLYCVVIIQKNYRAFLLRRRFLHLKK

SEQ ID NO: 35016 - protein, 43 aa, Artificial Sequence
  Quasi-synthetic sequence derived from human genome
RFRSLLVRRRFISLKKATIFVQRKYRATICAKHKLYQFLHLRK

SEQ ID NO: 35017 - protein, 43 aa, Artificial Sequence
  Quasi-synthetic sequence derived from human genome
LIRIVLFLQKVWRGTLARMRYKRTKAALTIIRYYRRYKVKSYI

SEQ ID NO: 35018 - protein, 43 aa, Artificial Sequence
  Quasi-synthetic sequence derived from human genome
RIIQLAVINFLAKQRLRKRVNAALVIQKYWRRVLAQRKLLMLK

SEQ ID NO: 35019 - protein, 43 aa, Artificial Sequence
  Quasi-synthetic sequence derived from human genome
FLYRKNRSRIPLLRKRWFQLGHSMNPRARKNRSRIPLLRKRRF

SEQ ID NO: 35020 - protein, 43 aa, Artificial Sequence
  Quasi-synthetic sequence derived from human genome
LRRVIAAFYFPKREKKRILFLYNDLLKKRAAFTKLRRAAILRR

SEQ ID NO: 35021 - protein, 43 aa, Artificial Sequence
  Quasi-synthetic sequence derived from human genome
ARKQYRKVLYCVVIIQKNYRAFLLRRRFLHLKKAAIVFQKQLR

SEQ ID NO: 35022 - protein, 43 aa, Artificial Sequence
  Quasi-synthetic sequence derived from human genome
RLAHRISKSKFSRYWRRWNRFCRRKCRAAVKSNVFYWLVIFLV

SEQ ID NO: 35023 - protein, 43 aa, Artificial Sequence
  Quasi-synthetic sequence derived from human genome
WWRGVLVRRTLLVAALRAWMIQCWWRTLVQRRIRQRRQALLRV

SEQ ID NO: 35024 - protein, 43 aa, Artificial Sequence
  Quasi-synthetic sequence derived from human genome
FNKFWRRYGKLSRHLMKVKLKKYTKFLFVRDPFVRLISAFRSK

SEQ ID NO: 35025 - protein, 43 aa, Artificial Sequence
  Quasi-synthetic sequence derived from human genome
LRGFFIKRRFRSLRHKIILLQSRARGYLARQRYQQMRRSLVKF

SEQ ID NO: 35026 - protein, 43 aa, Artificial Sequence
  Quasi-synthetic sequence derived from human genome
IPRWTHLLRLLRLIILLRIFHLFHQKRQLEKLIRRRVSENKRR

SEQ ID NO: 35027 - protein, 43 aa, Artificial Sequence
  Quasi-synthetic sequence derived from human genome
RSLLLGPARLCLRLLLLLGYRRRCPPLLRGLVQRWRYGKVCLR

SEQ ID NO: 35028 - protein, 43 aa, Artificial Sequence
  Quasi-synthetic sequence derived from human genome
KRALGRRKGVWLRLRKILFCVLGLYIAIPFLIKLCPGIQAKLI

SEQ ID NO: 35029 - protein, 43 aa, Artificial Sequence
  Quasi-synthetic sequence derived from human genome
IVSFYVPFIVTLLVYIKIYIVLRRRRKRVNTKRSSRAFRAHLR

SEQ ID NO: 35030 - protein, 43 aa, Artificial Sequence
  Quasi-synthetic sequence derived from human genome
RRLLLALHRRLRGLRRAAAGTSRLLFQRLLPCGVIKFRYIWIC

SEQ ID NO: 35031 - protein, 43 aa, Artificial Sequence
  Quasi-synthetic sequence derived from human genome
ARKKRSRIPLLRKRRFQLGRSMNPRARKNRSRIPLLRKRRFQL

SEQ ID NO: 35032 - protein, 43 aa, Artificial Sequence
  Quasi-synthetic sequence derived from human genome
QMNVRMPFRRKIYYLPRRYKFMSRIDKQISRFRRWLPKKPMRL

SEQ ID NO: 35033 - protein, 43 aa, Artificial Sequence
  Quasi-synthetic sequence derived from human genome
LKVLFKKTHRILRRLFNLCKRCHRQPRFRLPKERSLSYWWNRI

SEQ ID NO: 35034 - protein, 43 aa, Artificial Sequence
  Quasi-synthetic sequence derived from human genome
VIIQKNYRAFLLRRRFLHLKKAAIVFQKQLRGQIARRVYRQLL

SEQ ID NO: 35035 - protein, 43 aa, Artificial Sequence
  Quasi-synthetic sequence derived from human genome
RSRIPLLRKRRFQLYRSMNPRARKNRSHIPLVRKRRFQLRRCM

SEQ ID NO: 35036 - protein, 43 aa, Artificial Sequence
  Quasi-synthetic sequence derived from human genome
RALRAPRKKIHRRVLKKNPLKNLRIMLKLNPYAKTMRRNTILR

SEQ ID NO: 35037 - protein, 43 aa, Artificial Sequence
  Quasi-synthetic sequence derived from human genome
FLYRKNRSRIPLLRKPWFQLGHSMNPRARKNRSRIPLLRKRRF

SEQ ID NO: 35038 - protein, 43 aa, Artificial Sequence
  Quasi-synthetic sequence derived from human genome
KLLPLRTFRVFRALKAISVVSRLKVIVGALLRSVKKLVNVIIL

SEQ ID NO: 35039 - protein, 43 aa, Artificial Sequence
  Quasi-synthetic sequence derived from human genome
LGLARKKSGILLLTLVSFLIFILFIIVQLFIMKLRKAHVIWKK

SEQ ID NO: 35040 - protein, 43 aa, Artificial Sequence
  Quasi-synthetic sequence derived from human genome
LNKIMKTRVCRRLRRANRVLRARCRRAVKSNACYWAVLLLVFL

SEQ ID NO: 35041 - protein, 43 aa, Artificial Sequence
  Quasi-synthetic sequence derived from human genome
RKNRSRIPLLRKRRFQLGRSMNLRARKNRSQIVLFQKRRFQFF

SEQ ID NO: 35042 - protein, 43 aa, Artificial Sequence
  Quasi-synthetic sequence derived from human genome
KSKLSRRWRRWNRFNRRRCRAAVKSVTFYWLVIVLVFLNTLTI

SEQ ID NO: 35043 - protein, 43 aa, Artificial Sequence
  Quasi-synthetic sequence derived from human genome
KFLRRTKAATIIQKYWRMYVVRRRYKIRRAATIVLQSYLRGFL

SEQ ID NO: 35044 - protein, 43 aa, Artificial Sequence
  Quasi-synthetic sequence derived from human genome
VKAVIDRFLRLHCGLWVRRKAGYKKKLWKKTPARKKRLREFVF

SEQ ID NO: 35045 - protein, 43 aa, Artificial Sequence
  Quasi-synthetic sequence derived from human genome
RPKLSGRLGLLGRRGFSGRLGGYWKTWIFWKTWIFWKTWIFRK

SEQ ID NO: 35046 - protein, 43 aa, Artificial Sequence
  Quasi-synthetic sequence derived from human genome
KLTKWKHSRTMMLVVFKSAPILKRALKVKQAMLQLYVLKLLKL

SEQ ID NO: 35047 - protein, 43 aa, Artificial Sequence
  Quasi-synthetic sequence derived from human genome
RSRIPLLRKRRFQLYRSTNPRARKNRSRIPLLRKRRFQLYRSM

SEQ ID NO: 35048 - protein, 43 aa, Artificial Sequence
  Quasi-synthetic sequence derived from human genome
RKNRSRIPLLRKRRFQLYRSMNSRARKNRSQIVLFQKRRFHFF

SEQ ID NO: 35049 - protein, 43 aa, Artificial Sequence
  Quasi-synthetic sequence derived from human genome
WMRRMRILRRLLRRYRESKKIDRHMYHSLYLKVKGNVFKNKRI

SEQ ID NO: 35050 - protein, 43 aa, Artificial Sequence
  Quasi-synthetic sequence derived from human genome
RLYLQKKIIQKHFEKKKDIRRGIGYLKLICFLIPFLLSLKKKM

SEQ ID NO: 35051 - protein, 43 aa, Artificial Sequence
  Quasi-synthetic sequence derived from human genome
RLARAYRRSQRASFKRARRPGARALRLVLGIVLLFWACFLPFW

SEQ ID NO: 35052 - protein, 43 aa, Artificial Sequence
  Quasi-synthetic sequence derived from human genome
MRRIRYEFKAKNIKKKKVSIMVSVDGVKVILKKKKKLLLLQKK

SEQ ID NO: 35053 - protein, 43 aa, Artificial Sequence
  Quasi-synthetic sequence derived from human genome
RRPWGAWLSARLWKWLKSPRSWRLGLALLLGGALLFWVLLHRR

SEQ ID NO: 35054 - protein, 43 aa, Artificial Sequence
  Quasi-synthetic sequence derived from human genome
RKNRSHIPLVRKRRFQLRRCMNPRARKNRSQIVLFQKRRFHFF

SEQ ID NO: 35055 - protein, 43 aa, Artificial Sequence
  Quasi-synthetic sequence derived from human genome
SKLGVLLRRVTRNLVRNKLAVITRLLQNLIMGLFLLFFVLRVR

SEQ ID NO: 35056 - protein, 43 aa, Artificial Sequence
  Quasi-synthetic sequence derived from human genome
FLYGKTRSRIPLLRKRRFQLCRCMNPRARKNRSQIVLFQKLRF

SEQ ID NO: 35057 - protein, 43 aa, Artificial Sequence
  Quasi-synthetic sequence derived from human genome
ILIPTILGLFLLALLGLVVKRAVERRKALSRRARRLAVRMRAL

SEQ ID NO: 35058 - protein, 43 aa, Artificial Sequence
  Quasi-synthetic sequence derived from human genome
RIQKTIRGWLLRKKYLRMRKAAITMQRYVRGYQARCYAKFLRR

SEQ ID NO: 35059 - protein, 43 aa, Artificial Sequence
  Quasi-synthetic sequence derived from human genome
WRQKFLRVKRSAICIQSWWRGTLGRRKAAKRKWAAQTIRRLIR

SEQ ID NO: 35060 - protein, 43 aa, Artificial Sequence
  Quasi-synthetic sequence derived from human genome
KFFLLKRFNKEKLGLLLLTFLGIVAAVLVKKYQAVLRRKALLI

SEQ ID NO: 35061 - protein, 43 aa, Artificial Sequence
  Quasi-synthetic sequence derived from human genome
IPRWTHLVRLLRLIILIRIFHLLHQKRQLEKLMRRLVSENKRR

SEQ ID NO: 35062 - protein, 43 aa, Artificial Sequence
  Quasi-synthetic sequence derived from human genome
KKIIQKHFEKKKDIRRGIGYLKLICFLIPFLLSLKKKMKVPYL

SEQ ID NO: 35063 - protein, 43 aa, Artificial Sequence
  Quasi-synthetic sequence derived from human genome
RLRELRIRCVARKFLYLWIRMTFGRVFPSKARFYYEQRLLRKV

SEQ ID NO: 35064 - protein, 43 aa, Artificial Sequence
  Quasi-synthetic sequence derived from human genome
RLKNIRKVYGRCMWYRLRLLKPQPNIIPTVKKIVLLAGWALFL

SEQ ID NO: 35065 - protein, 43 aa, Artificial Sequence
  Quasi-synthetic sequence derived from human genome
VFWPILVMYFIMLFCITMKRQIKHMIKYRYIPFTHGKRRYRGK

SEQ ID NO: 35066 - protein, 43 aa, Artificial Sequence
  Quasi-synthetic sequence derived from human genome
IRTPILMTILINFLIFIRILGILLSKLRTRQMRCRDYRLRLAR

SEQ ID NO: 35067 - protein, 43 aa, Artificial Sequence
  Quasi-synthetic sequence derived from human genome
LHAKLLKKRSKQPLGEVKRRLSLYLTKIHFWLPVLKMIRKKQM

SEQ ID NO: 35068 - protein, 43 aa, Artificial Sequence
  Quasi-synthetic sequence derived from human genome
RLPVKKIRKQMKLLLLLLLLSCAAWLTYVHLGLVRQGRALRQR

SEQ ID NO: 35069 - protein, 43 aa, Artificial Sequence
  Quasi-synthetic sequence derived from human genome
KLTKWKHSRTMMLVVFKSAPILKRALKVKQAMMQLYVLKLLKV

SEQ ID NO: 35070 - protein, 43 aa, Artificial Sequence
  Quasi-synthetic sequence derived from human genome
HKYRKLVKKTRFLRRKVQEGRLRRKQIKFEKDLRRIWLKAGLK

SEQ ID NO: 35071 - protein, 43 aa, Artificial Sequence
  Quasi-synthetic sequence derived from human genome
RSRIPLLRKRRFQLYRSTNPRARKNRSRIPLLRKHRFQLYRSM

SEQ ID NO: 35072 - protein, 43 aa, Artificial Sequence
  Quasi-synthetic sequence derived from human genome
IQKYFFSPTLFRVIRLARIGRILRLIRGAKGIRTLLFALMMSL

SEQ ID NO: 35073 - protein, 43 aa, Artificial Sequence
  Quasi-synthetic sequence derived from human genome
TLPRRRGRPSRRFLGKKYRKYYYKSPKPLLRPFLCRICGSRFL

SEQ ID NO: 35074 - protein, 43 aa, Artificial Sequence
  Quasi-synthetic sequence derived from human genome
FRVIRLARIGRILRLIRAAKGIRTLLFALMMSLPALFNIGLLL

SEQ ID NO: 35075 - protein, 43 aa, Artificial Sequence
  Quasi-synthetic sequence derived from human genome
LFLVQKKPLIFLGCCFFSTLVLLLSIAIFQRQKRRKFWKAKNL

SEQ ID NO: 35076 - protein, 43 aa, Artificial Sequence
  Quasi-synthetic sequence derived from human genome
LLRICRVLRSLKLLAQFRQIQIIILVLVRALKSMTFLLMLLLI

SEQ ID NO: 35077 - protein, 43 aa, Artificial Sequence
  Quasi-synthetic sequence derived from human genome
PRSLKHLCRLKIRKCMGRLHLRCPVFMSFLPLPNRLKAYVLYK

SEQ ID NO: 35078 - protein, 43 aa, Artificial Sequence
  Quasi-synthetic sequence derived from human genome
YFANIGFFRRKLIDAVGFSPLRILRKRNKALRKIRKLQKQGLL

SEQ ID NO: 35079 - protein, 43 aa, Artificial Sequence
  Quasi-synthetic sequence derived from human genome
RKNRSRIPLLRKHRFQLYRSMNSRARKNRSQIVLFQKRRFHFF

SEQ ID NO: 35080 - protein, 43 aa, Artificial Sequence
  Quasi-synthetic sequence derived from human genome
LAEKAKRCNRRLKSQILLKKYLMKRRWKKNFIAVSAANRFKKI

SEQ ID NO: 35081 - protein, 43 aa, Artificial Sequence
  Quasi-synthetic sequence derived from human genome
LVGVLILFMFRRLRQFRQAQPTPQYRFRKRDKVMFYGRKIMRK

SEQ ID NO: 35082 - protein, 43 aa, Artificial Sequence
  Quasi-synthetic sequence derived from human genome
RALALFVLTCVVLTFLGHRLLKRLLGPKLRRFLKPQGHPRLLL

SEQ ID NO: 35083 - protein, 43 aa, Artificial Sequence
  Quasi-synthetic sequence derived from human genome
PVPLSVLILSLLVLFFSAVFVAAGLFAYVLRRRRKKLPFRSKR

SEQ ID NO: 35084 - protein, 43 aa, Artificial Sequence
  Quasi-synthetic sequence derived from human genome
ASFLFVLMLLFFTILVLSYFRYMRIYRRYIYEPLHKPQRKRKK

SEQ ID NO: 35085 - protein, 43 aa, Artificial Sequence
  Quasi-synthetic sequence derived from human genome
TLKKKRRNFAELKIKRLRKKFAQKMLRKARRKLIYEKAKHYHK

SEQ ID NO: 35086 - protein, 43 aa, Artificial Sequence
  Quasi-synthetic sequence derived from human genome
FRVIRLARIGRILRLIRGAKGIRTLLFALMMSLPALFNIGLLL

SEQ ID NO: 35087 - protein, 43 aa, Artificial Sequence
  Quasi-synthetic sequence derived from human genome
KFILWRRFRWAIILFIILFILLLFLAIFIYAFPNYAAMKLVKP

SEQ ID NO: 35088 - protein, 43 aa, Artificial Sequence
  Quasi-synthetic sequence derived from human genome
LYMCHKCKKKQKSTKKFWIQKLPKVLCLHLKRFHWTAYLRNKV

SEQ ID NO: 35089 - protein, 43 aa, Artificial Sequence
  Quasi-synthetic sequence derived from human genome
WTHLVRLLRLIILIRIFHLLHQKRQLEKLMRRLVSENKRRYTR

SEQ ID NO: 35090 - protein, 43 aa, Artificial Sequence
  Quasi-synthetic sequence derived from human genome
IFNFILVVMFWLIFLLIILSYIKIGKNLLRISKRRSKFPNSGK

SEQ ID NO: 35091 - protein, 43 aa, Artificial Sequence
  Quasi-synthetic sequence derived from human genome
ATWKCYKARKFFLFYRQQKWASGVIAIAWLLYCHKTRLKKILK

SEQ ID NO: 35092 - protein, 43 aa, Artificial Sequence
  Quasi-synthetic sequence derived from human genome
RRYKIRRAATIVLQSYLRGFLARNRYRKILREHKAVIIQKRVR

SEQ ID NO: 35093 - protein, 43 aa, Artificial Sequence
  Quasi-synthetic sequence derived from human genome
LFRVIRLARIGRILRLIKGAKGIRTLLFALMMSLPALFNIGLL

SEQ ID NO: 35094 - protein, 43 aa, Artificial Sequence
  Quasi-synthetic sequence derived from human genome
FVRGYLVRKQMRLQRKAVISLQSYFRMRKARQYYLKMYKAIIV

SEQ ID NO: 35095 - protein, 43 aa, Artificial Sequence
  Quasi-synthetic sequence derived from human genome
RRRNTPFHERFFRFLLRKLYVFRRSFLMTCISLRNLILGRPSL

SEQ ID NO: 35096 - protein, 43 aa, Artificial Sequence
  Quasi-synthetic sequence derived from human genome
KAKQRLKRLRNIHYLFNTALFLIAWRLLIARSQMARNVWFFIV

SEQ ID NO: 35097 - protein, 43 aa, Artificial Sequence
  Quasi-synthetic sequence derived from human genome
PKAALAVIRGGATRAAGVFYPWRFRLLCLLRRWLPRPRAWFIR

SEQ ID NO: 35098 - protein, 43 aa, Artificial Sequence
  Quasi-synthetic sequence derived from human genome
LFVYLNRKIVQVMRKQKTINRFLMRKRLLFPALVTLLISTLTF

SEQ ID NO: 35099 - protein, 43 aa, Artificial Sequence
  Quasi-synthetic sequence derived from human genome
FRVIRLARIGRVLRLIRGAKGIRTLLFALMMSLPALFNIGLLL

SEQ ID NO: 35100 - protein, 43 aa, Artificial Sequence
  Quasi-synthetic sequence derived from human genome
RTLDRRLRKNLRALVVVHATWYVKAFLALLRPFISSKFTRKIR

SEQ ID NO: 35101 - protein, 43 aa, Artificial Sequence
  Quasi-synthetic sequence derived from human genome
RARPGAWRRDIFGRIIWHKFKQWVIPWHLNKRYNRKRFFALPY

SEQ ID NO: 35102 - protein, 43 aa, Artificial Sequence
  Quasi-synthetic sequence derived from human genome
MWRRYRAKKYLCKVKAACKIQAWYRCWRAHKEYLAILKAVKII

SEQ ID NO: 35103 - protein, 43 aa, Artificial Sequence
  Quasi-synthetic sequence derived from human genome
FIQAWWRGMLVRRTLLHAALRAWIIQCWWRQVLEKLLAKRRRM

SEQ ID NO: 35104 - protein, 43 aa, Artificial Sequence
  Quasi-synthetic sequence derived from human genome
LRVLRVLRPLKTIKRLPKLKAVFDCVVTSLKNVFNILIVYKLF

SEQ ID NO: 35105 - protein, 43 aa, Artificial Sequence
  Quasi-synthetic sequence derived from human genome
LFRVIRLARIGRILRLVKGAKGIRTLLFALMMSLPALFNIGLL

SEQ ID NO: 35106 - protein, 43 aa, Artificial Sequence
  Quasi-synthetic sequence derived from human genome
LIAVRLASLNQILDPWVYLLLRKILLRKFCQMRKRRLREQFWR

SEQ ID NO: 35107 - protein, 43 aa, Artificial Sequence
  Quasi-synthetic sequence derived from human genome
RIHRPRRRTTRRWKRWFKFRKRKGEKRPRPNHKAVARRAKLKF

SEQ ID NO: 35108 - protein, 43 aa, Artificial Sequence
  Quasi-synthetic sequence derived from human genome
FHRWKVVLLVRTDKRSDSLIRKKFRMMKIPKPILFGLNIAMKK

SEQ ID NO: 35109 - protein, 43 aa, Artificial Sequence
  Quasi-synthetic sequence derived from human genome
LLVKLRLCFLVMAYGTTIFHPLLYAFTRQKFQKVLKSKMKKRV

SEQ ID NO: 35110 - protein, 43 aa, Artificial Sequence
  Quasi-synthetic sequence derived from human genome
RWKKVQWCSLSVIKLKNKIKYRAEACIKMQKTIRMWLCKRRHK

SEQ ID NO: 35111 - protein, 43 aa, Artificial Sequence
  Quasi-synthetic sequence derived from human genome
RLFRIKCVTRIQAYWRGCVVRKWYRNLRKTVPPTDAKLRKKFF

SEQ ID NO: 35112 - protein, 43 aa, Artificial Sequence
  Quasi-synthetic sequence derived from human genome
KLLSVFRQPLSSLWRSLVPLFCWLRATFWLLATKRRKQQLVLR

SEQ ID NO: 35113 - protein, 43 aa, Artificial Sequence
  Quasi-synthetic sequence derived from human genome
VIRRKVSKIQRFHARSLWTNHKRYGYKKHSYRLVKKLKLQKMK

SEQ ID NO: 35114 - protein, 43 aa, Artificial Sequence
  Quasi-synthetic sequence derived from human genome
KINLAVANTGILVFQGFTKINAFNWAKVRKLSFKRKRFLIKLR

SEQ ID NO: 35115 - protein, 43 aa, Artificial Sequence
  Quasi-synthetic sequence derived from human genome
ATKIQAWWRGTLVRRALLHAALSACIIQCWWRLILSKILKKRR

SEQ ID NO: 35116 - protein, 43 aa, Artificial Sequence
  Quasi-synthetic sequence derived from human genome
LMRLGFLRLQALHRSRKLHQQYRLARQRIIQFQARCRAYLVRK

SEQ ID NO: 35117 - protein, 43 aa, Artificial Sequence
  Quasi-synthetic sequence derived from human genome
ALLVLLALAAWASRWLRRKLRARRKGGAPVHVRHMYSTRRPLR

SEQ ID NO: 35118 - protein, 43 aa, Artificial Sequence
  Quasi-synthetic sequence derived from human genome
GAARVARWRRLRLQQLRRLRGLLRVLRGRPGAGSRRRGRMALC

SEQ ID NO: 35119 - protein, 43 aa, Artificial Sequence
  Quasi-synthetic sequence derived from human genome
FRIKRFLAKKQKQNRPIPQWIRMKTGNKIRYNSKRRHWRRTKL

SEQ ID NO: 35120 - protein, 43 aa, Artificial Sequence
  Quasi-synthetic sequence derived from human genome
WLIISCSIAYVALVTLLIWVPVKVILHKKRYIYRKIKGWRPVL

SEQ ID NO: 35121 - protein, 43 aa, Artificial Sequence
  Quasi-synthetic sequence derived from human genome
MSLKLTCSAFRLQRALRFLLGRLPWRVASGARRFRRWLNRYSY

SEQ ID NO: 35122 - protein, 43 aa, Artificial Sequence
  Quasi-synthetic sequence derived from human genome
IIQKRVRGWLARTHYKRSMHAIIYLQCCFRRMMAKRELKKLKI

SEQ ID NO: 35123 - protein, 43 aa, Artificial Sequence
  Quasi-synthetic sequence derived from human genome
KLLERAGLVLRLLRALRVLYVMRLARHSLGLRSLGLTMRRCAR

SEQ ID NO: 35124 - protein, 43 aa, Artificial Sequence
  Quasi-synthetic sequence derived from human genome
RKRCIKKFSIQRFPKILVLHLKRFSESRIRTSKLTTFVNFPLR

SEQ ID NO: 35125 - protein, 43 aa, Artificial Sequence
  Quasi-synthetic sequence derived from human genome
PKIPSIATGMVGALLLLLVVALGIGLFMRRRHIVRKRTLRRLL

SEQ ID NO: 35126 - protein, 43 aa, Artificial Sequence
  Quasi-synthetic sequence derived from human genome
RRLRRLAHLVLFCPFSKRLQGRLPGLRVRCIFLAWLGVFAGSW

SEQ ID NO: 35127 - protein, 43 aa, Artificial Sequence
  Quasi-synthetic sequence derived from human genome
KRMRVKKLPMILALHLKRFKYMEQLHRYTKLSYRVVFPLELRL

SEQ ID NO: 35128 - protein, 43 aa, Artificial Sequence
  Quasi-synthetic sequence derived from human genome
SRRRGFGLFFFLRLHRLLLLFLVLRGTLANKLNVPQVLLPFGR

SEQ ID NO: 35129 - protein, 43 aa, Artificial Sequence
  Quasi-synthetic sequence derived from human genome
LGLLVAGVLVLLVSLGVAIHLCCRRRRARLRFMKQKFNIVCLK

SEQ ID NO: 35130 - protein, 43 aa, Artificial Sequence
  Quasi-synthetic sequence derived from human genome
RLLRSRAGSRKRPLTLLQRAGLLLLLGLLGFLALLALMSRLGR

SEQ ID NO: 35131 - protein, 43 aa, Artificial Sequence
  Quasi-synthetic sequence derived from human genome
AVLILLVVRRLRVPKTPAPDGPRYRFRKRDKVLFYGRKIMRKV

SEQ ID NO: 35132 - protein, 43 aa, Artificial Sequence
  Quasi-synthetic sequence derived from human genome
FFMPLGIILFCSFKIVWSLRRRQQLARQARMKKATRFIMVVAI

SEQ ID NO: 35133 - protein, 43 aa, Artificial Sequence
  Quasi-synthetic sequence derived from human genome
MSLFLFFFVLFLCLFFYNCYKGYLPRQCLKFRSALLIGKKKPK

SEQ ID NO: 35134 - protein, 43 aa, Artificial Sequence
  Quasi-synthetic sequence derived from human genome
PVKVRVSYQKLLKYYVLNALKHRPPKAQKKRYLFRSFKATKFF

SEQ ID NO: 35135 - protein, 43 aa, Artificial Sequence
  Quasi-synthetic sequence derived from human genome
LRALRLLRIFKITKYWASLRNLVVSLMSSMKSIISLLFLLFLF

SEQ ID NO: 35136 - protein, 43 aa, Artificial Sequence
  Quasi-synthetic sequence derived from human genome
KILTVRVILAPWKKGLIAVVIIGVIIALLIIAAKCYFLRKAKA

SEQ ID NO: 35137 - protein, 43 aa, Artificial Sequence
  Quasi-synthetic sequence derived from human genome
KLVSPKWKNFKGLKLLCRDKIRLNNAIWRAWYIQYVKRRKSPV

SEQ ID NO: 35138 - protein, 43 aa, Artificial Sequence
  Quasi-synthetic sequence derived from human genome
RRKKKKTIKMLMLVVVLFALCWFPLNCYVLLLSSKVIRTNNAL

SEQ ID NO: 35139 - protein, 43 aa, Artificial Sequence
  Quasi-synthetic sequence derived from human genome
LIQGYWRRYSTRQRFLKLKYYSIILQSRIRMIIAVTSYKRYLW

SEQ ID NO: 35140 - protein, 43 aa, Artificial Sequence
  Quasi-synthetic sequence derived from human genome
VGICLILIVIFMITKFVQDRHRARRNRLRKDQLKKLPVHKFKK

SEQ ID NO: 35141 - protein, 43 aa, Artificial Sequence
  Quasi-synthetic sequence derived from human genome
KFIVWRRFKWVIIGLLFLLILLLFVAVLLYSLPNYLSMKIVKP

SEQ ID NO: 35142 - protein, 43 aa, Artificial Sequence
  Quasi-synthetic sequence derived from human genome
LARRKGRHMGIGKRKGTANARMPEKVTWMRRMRILRRLLRRYR

SEQ ID NO: 35143 - protein, 43 aa, Artificial Sequence
  Quasi-synthetic sequence derived from human genome
LLQISKLKEVTLFVKRLRRKTYLSNMAKTMRMVLKSKRRVSVL

SEQ ID NO: 35144 - protein, 43 aa, Artificial Sequence
  Quasi-synthetic sequence derived from human genome
LCKLLRFFYSLFFPGLIVCGTLCVCLVIVLWGIRLLLQRKKKL

SEQ ID NO: 35145 - protein, 43 aa, Artificial Sequence
  Quasi-synthetic sequence derived from human genome
PLIYPCSSREFKRAFLRLLRCQCRRRRRRRPLWRVYGHHWRAS

SEQ ID NO: 35146 - protein, 43 aa, Artificial Sequence
  Quasi-synthetic sequence derived from human genome
MGFVRQIQLLLWKNWTLRKRQKIRFVVELVWPLSLFLVLIWLR

SEQ ID NO: 35147 - protein, 43 aa, Artificial Sequence
  Quasi-synthetic sequence derived from human genome
KRLVKLHIKRHYHKKFWKLGAVIFFFIIVLVLMQREVSVQYSK

SEQ ID NO: 35148 - protein, 43 aa, Artificial Sequence
  Quasi-synthetic sequence derived from human genome
LRALRLLRIFKVTKYWSSLRNLVVSLLNSMKSIISLLFLLFLF

SEQ ID NO: 35149 - protein, 43 aa, Artificial Sequence
  Quasi-synthetic sequence derived from human genome
RRQKLLLAQLHHRKRVKAAGQIQAWWRGVLVRRTLLVAALRAW

SEQ ID NO: 35150 - protein, 43 aa, Artificial Sequence
  Quasi-synthetic sequence derived from human genome
LLKIKNTFCLWKRLIKLKDNHCEQLRVKIRKLKNKASVLQKRI

SEQ ID NO: 35151 - protein, 43 aa, Artificial Sequence
  Quasi-synthetic sequence derived from human genome
RLAFQGWLRRGVLLVRAPPACLQVLRDAWRRRALRPPRGFRIR

SEQ ID NO: 35152 - protein, 43 aa, Artificial Sequence
  Quasi-synthetic sequence derived from human genome
MLKYQKILWKVPSFLITQVRRMNEATMLLKKQLPSVRKLLRRK

SEQ ID NO: 35153 - protein, 43 aa, Artificial Sequence
  Quasi-synthetic sequence derived from human genome
FFRAGQVAYLEKLRADKLRAACIRIQKTIRGWLLRKKYLRMRK

SEQ ID NO: 35154 - protein, 43 aa, Artificial Sequence
  Quasi-synthetic sequence derived from human genome
RKKRSWYLTWKYKLTNQRALRRFCQTGAVLFLLVTVIVNIKLI

SEQ ID NO: 35155 - protein, 43 aa, Artificial Sequence
  Quasi-synthetic sequence derived from human genome
WKTWIFWKTWIFRKTYIGWKTWIFSGRCGLTGRPGFGGRRRFF

SEQ ID NO: 35156 - protein, 43 aa, Artificial Sequence
  Quasi-synthetic sequence derived from human genome
LRILHISVMGGMIALLLSILCLVMILYTRRRWCKRRRVPQPQK

SEQ ID NO: 35157 - protein, 43 aa, Artificial Sequence
  Quasi-synthetic sequence derived from human genome
SRGFLARRRYRKMLEEHKAVILQKYARAWLARRRFQSIRRFVL

SEQ ID NO: 35158 - protein, 43 aa, Artificial Sequence
  Quasi-synthetic sequence derived from human genome
LVKPKIVKKRTKKFIRHQSDRYVKIKRNWRKPRGIDNRVRRRF

SEQ ID NO: 35159 - protein, 43 aa, Artificial Sequence
  Quasi-synthetic sequence derived from human genome
VRKILLLQSWFRMVLERRHFLQMKRAAVTIQACWRSYRVRRAL

SEQ ID NO: 35160 - protein, 43 aa, Artificial Sequence
  Quasi-synthetic sequence derived from human genome
KRATLKNLRKQYRNVKKMTAKELVKVLFSFFWMLFVGLFQLLF

SEQ ID NO: 35161 - protein, 43 aa, Artificial Sequence
  Quasi-synthetic sequence derived from human genome
NVLVKRKRTKGKKLLLSIGVLLHKWKNVCIVLTALNFPSILLL

SEQ ID NO: 35162 - protein, 43 aa, Artificial Sequence
  Quasi-synthetic sequence derived from human genome
KKYPQPKGQKKKKIVKYGMGGLIILFLIAIIWFPLLFMSLVRS

SEQ ID NO: 35163 - protein, 43 aa, Artificial Sequence
  Quasi-synthetic sequence derived from human genome
KAKPKKQSKKKVPFWNVQNKIILFTVFLFILAVIAWTLLWLYI

SEQ ID NO: 35164 - protein, 43 aa, Artificial Sequence
  Quasi-synthetic sequence derived from human genome
RRRMPGIGWLKKCYQMIDRRLRKNLKSLIIVHPSWFIRTVLAI

SEQ ID NO: 35165 - protein, 43 aa, Artificial Sequence
  Quasi-synthetic sequence derived from human genome
VFHKYSNRNKVRHTKKKTFKCIKCSKSFFMLSCLIRHKRIHIR

SEQ ID NO: 35166 - protein, 43 aa, Artificial Sequence
  Quasi-synthetic sequence derived from human genome
RMPFRRKIYYLPRRYKFMSRIDKQISRFRRWLPKKPMRLDKET

SEQ ID NO: 35167 - protein, 43 aa, Artificial Sequence
  Quasi-synthetic sequence derived from human genome
ILYFKPSVFRCIALRWVRLLGFAIVYGTIILKLYRVLQLFLSR

SEQ ID NO: 35168 - protein, 43 aa, Artificial Sequence
  Quasi-synthetic sequence derived from human genome
MAFKLLILLIGTWALFFRKRRADMPRVFVFRALLLVLIFLFVV

SEQ ID NO: 35169 - protein, 43 aa, Artificial Sequence
  Quasi-synthetic sequence derived from human genome
WLLRTGGWKVSAVTLAYLIFCLCSLVGILHLQRALVLRRKRKR

SEQ ID NO: 35170 - protein, 43 aa, Artificial Sequence
  Quasi-synthetic sequence derived from human genome
IARKLQKNLKTGSFLNRLGKLLLHLFMVLCLTLFLNNIIKKIL

SEQ ID NO: 35171 - protein, 43 aa, Artificial Sequence
  Quasi-synthetic sequence derived from human genome
AKGFVMLAVSFLVAAICYFRRLHLYSGHKLKWWIGYLQRKFKR

SEQ ID NO: 35172 - protein, 43 aa, Artificial Sequence
  Quasi-synthetic sequence derived from human genome
LRIIRLVRVFRIFKLSRHSKGLQILGHTLRASMRELGLLIFFL

SEQ ID NO: 35173 - protein, 43 aa, Artificial Sequence
  Quasi-synthetic sequence derived from human genome
LGRREYVKKRQAAIKLEAHWRGALARKAIQRRKWAVRIIRKFI

SEQ ID NO: 35174 - protein, 43 aa, Artificial Sequence
  Quasi-synthetic sequence derived from human genome
RNIGIWFFWIRLYKIRRGRTRPQALLFLCMILLLIVLHTSYMI

SEQ ID NO: 35175 - protein, 43 aa, Artificial Sequence
  Quasi-synthetic sequence derived from human genome
WLKLVKGILPLVGMAMVPALLGLIGYHLYRKANRPKVSKKKLK

SEQ ID NO: 35176 - protein, 43 aa, Artificial Sequence
  Quasi-synthetic sequence derived from human genome
IKQFVWYTPPTFMIAVFLPIVVLIFKSILFLPCLRKKILKIRH

SEQ ID NO: 35177 - protein, 43 aa, Artificial Sequence
  Quasi-synthetic sequence derived from human genome
FFLIAVRLASLNQILDPWVYLLLRKILLRKFCQMRKRRLREQL

SEQ ID NO: 35178 - protein, 43 aa, Artificial Sequence
  Quasi-synthetic sequence derived from human genome
KKVLNLLKGAFPARLKKVLIVGAPIWFRVPYSIISLLLKDKVR

SEQ ID NO: 35179 - protein, 43 aa, Artificial Sequence
  Quasi-synthetic sequence derived from human genome
MRFQQFLFAFFIFIMSLLLISGQRPVNLTMRRKLRKHNCLQRR

SEQ ID NO: 35180 - protein, 43 aa, Artificial Sequence
  Quasi-synthetic sequence derived from human genome
KLLKRLRLLPALLILRAFKPHRKIRDYRVVVVGTAGVGKSTLL

SEQ ID NO: 35181 - protein, 43 aa, Artificial Sequence
  Quasi-synthetic sequence derived from human genome
LFVITCLVIFVLVHSFLKKLLGKKLTRCLKPFENSRLRLWTKW

SEQ ID NO: 35182 - protein, 43 aa, Artificial Sequence
  Quasi-synthetic sequence derived from human genome
TLGFIVPFAIIGLCYSLIVRVLVRAHRHRGLRPRRQKALRMIL

SEQ ID NO: 35183 - protein, 43 aa, Artificial Sequence
  Quasi-synthetic sequence derived from human genome
LLFARGAPAWLRRRYLRLRYEDLVRQPRAQLRRLLRFSGLRAL

SEQ ID NO: 35184 - protein, 43 aa, Artificial Sequence
  Quasi-synthetic sequence derived from human genome
RMKVKKLPMILALHLKRFKYMDQLHRYTKLSYRVVFPLELRLF

SEQ ID NO: 35185 - protein, 43 aa, Artificial Sequence
  Quasi-synthetic sequence derived from human genome
AIIKIQAWARMWAARRQYLRRLHYFQKNVNSIVKIQAFFRARK

SEQ ID NO: 35186 - protein, 43 aa, Artificial Sequence
  Quasi-synthetic sequence derived from human genome
RFLKIIRPLRNIFLKKPVFAKTVSIFIWFFLFFISLPNTILSN

SEQ ID NO: 35187 - protein, 43 aa, Artificial Sequence
  Quasi-synthetic sequence derived from human genome
FKLFTLVSACIPVFRLARRRKKILFYCHFPDLLLTKRDSFLKR

SEQ ID NO: 35188 - protein, 43 aa, Artificial Sequence
  Quasi-synthetic sequence derived from human genome
FLYGKTRSRIPLVRNRRFQLCRCMNPRARKNRSQIALFQKLRF

SEQ ID NO: 35189 - protein, 43 aa, Artificial Sequence
  Quasi-synthetic sequence derived from human genome
LALVGVLILFMFRRLRQFRQAQPTPQYRFRKRDKVMFYGRKIM

SEQ ID NO: 35190 - protein, 43 aa, Artificial Sequence
  Quasi-synthetic sequence derived from human genome
IKSLRVLRVLRPLKTIKRLPKLKAVFDCVVNSLKNVFNILIVY

SEQ ID NO: 35191 - protein, 43 aa, Artificial Sequence
  Quasi-synthetic sequence derived from human genome
IKSLRVLRVLRPLKTIKRLPKLKAVFDCVVNSLKNVLNILIVY

SEQ ID NO: 35192 - protein, 43 aa, Artificial Sequence
  Quasi-synthetic sequence derived from human genome
FRIQEVLKHARHFRGRKNRCYRLAVRTVIRAFVKCTKARYLKK

SEQ ID NO: 35193 - protein, 43 aa, Artificial Sequence
  Quasi-synthetic sequence derived from human genome
FRYLQRLLLVHGRWSYIRMCKFLRYFFYKNFAFTLVHFWYSFF

SEQ ID NO: 35194 - protein, 43 aa, Artificial Sequence
  Quasi-synthetic sequence derived from human genome
ILLRDLPTLKAAVIVAFAFTTLLIACLLLRVFRSGKRLKKTRK

SEQ ID NO: 35195 - protein, 43 aa, Artificial Sequence
  Quasi-synthetic sequence derived from human genome
LRMPLSRWQRRLRRAARRQVLSGHLPFCRFRLRYPSLSPSAFW

SEQ ID NO: 35196 - protein, 43 aa, Artificial Sequence
  Quasi-synthetic sequence derived from human genome
MKLLKLRRNIVKLSLYRHFTNTLILAVAASIVFIIWTTMKFRI

SEQ ID NO: 35197 - protein, 43 aa, Artificial Sequence
  Quasi-synthetic sequence derived from human genome
MKFFRWVRRAWQRIISWVFFWRQKIKPTISGHPDSKKHSLKKM

SEQ ID NO: 35198 - protein, 43 aa, Artificial Sequence
  Quasi-synthetic sequence derived from human genome
VVKILRVLRVLRPLRAINRAKGLKHVVQCVFVAIRTIGNIMIV

SEQ ID NO: 35199 - protein, 43 aa, Artificial Sequence
  Quasi-synthetic sequence derived from human genome
RIQFFLQMAVYRRRFVQQKRAAITLQHYFRTWQTRKQFLLYRK

SEQ ID NO: 35200 - protein, 43 aa, Artificial Sequence
  Quasi-synthetic sequence derived from human genome
RMRGFQARKRYLRRRAALGQLNTILLVAQPLLQRRQRLQLGRW

SEQ ID NO: 35201 - protein, 43 aa, Artificial Sequence
  Quasi-synthetic sequence derived from human genome
LRGDRGQILVICLIAVMVVFIILVIGVCTCCHPLRKRRKRKKK

SEQ ID NO: 35202 - protein, 43 aa, Artificial Sequence
  Quasi-synthetic sequence derived from human genome
LKIVILGLVLPLLVMVICYSGILKTLLRCRNEKKRHRAVRLIF

SEQ ID NO: 35203 - protein, 43 aa, Artificial Sequence
  Quasi-synthetic sequence derived from human genome
RRPRPRRELSLGRKKAPHRLCGRFSRISMKLPRIPLRRQKLPK

SEQ ID NO: 35204 - protein, 43 aa, Artificial Sequence
  Quasi-synthetic sequence derived from human genome
RRRMPGLGWMKKCYQMIDRRLRKNLKSFIIVHPSWFIRTILAV

SEQ ID NO: 35205 - protein, 43 aa, Artificial Sequence
  Quasi-synthetic sequence derived from human genome
VVKILRVLRVLRPLRAINRAKGLKHVVQCVFVAIRTIGNIVIV

SEQ ID NO: 35206 - protein, 43 aa, Artificial Sequence
  Quasi-synthetic sequence derived from human genome
NRPKIAAFLPARQLWKWFGKPTQRRGMKGKARKLFYKAIVRGK

SEQ ID NO: 35207 - protein, 43 aa, Artificial Sequence
  Quasi-synthetic sequence derived from human genome
RMGVGCRLSRALLTAVTNVLIFFWCLAFLWGLLILLKYRWRKL

SEQ ID NO: 35208 - protein, 43 aa, Artificial Sequence
  Quasi-synthetic sequence derived from human genome
LYRSYVRTRGVGKVPRKKVNVKVFIIIAVFFICFVPFHFARIP

SEQ ID NO: 35209 - protein, 43 aa, Artificial Sequence
  Quasi-synthetic sequence derived from human genome
WRMRQDRVRFLNLKKTIIKFQAHVRKHQQRQKYKKMKKAAVII

SEQ ID NO: 35210 - protein, 43 aa, Artificial Sequence
  Quasi-synthetic sequence derived from human genome
LWFAAWLKVFYCLRIANFNHPLFFLMKRKIIVLMPWLLRLSVL

SEQ ID NO: 35211 - protein, 43 aa, Artificial Sequence
  Quasi-synthetic sequence derived from human genome
IKRKAPRGFLKRVFKRKKPQLRLEKSGDLLVHLNCLLFVHRLA

SEQ ID NO: 35212 - protein, 43 aa, Artificial Sequence
  Quasi-synthetic sequence derived from human genome
PPKPKLSKFILISSLAILLMVSLLLLSLWKLWRVKKFLIPSVP

SEQ ID NO: 35213 - protein, 43 aa, Artificial Sequence
  Quasi-synthetic sequence derived from human genome
TLHLVLRLRGGAKKRKKKSYTTPKKNKHKRKKVKLAVLKYYKV

SEQ ID NO: 35214 - protein, 43 aa, Artificial Sequence
  Quasi-synthetic sequence derived from human genome
CPFCLKLLLPGLLLLLVVIILILAFWVLPKYKTRKAMRNNVPR

SEQ ID NO: 35215 - protein, 43 aa, Artificial Sequence
  Quasi-synthetic sequence derived from human genome
LRVLRMMRIFWVIKLARHFIGLQTLGLTLKRCYREMVMLLVFI

SEQ ID NO: 35216 - protein, 43 aa, Artificial Sequence
  Quasi-synthetic sequence derived from human genome
IAHLGVFPSKAERKITSRPFTRFRTAVRVVIAILRLRFLVKKW

SEQ ID NO: 35217 - protein, 43 aa, Artificial Sequence
  Quasi-synthetic sequence derived from human genome
KAAINLAKLKLFRHYYVLIVCYIYFTRIIAFLLKLAVPFQWKW

SEQ ID NO: 35218 - protein, 43 aa, Artificial Sequence
  Quasi-synthetic sequence derived from human genome
MRRHFRMKLRNLFTKFIRKFGFELVKRLLPEEYHRVLVNIRKA

SEQ ID NO: 35219 - protein, 43 aa, Artificial Sequence
  Quasi-synthetic sequence derived from human genome
LRKYIYIRSCVVIIQKRFRCFQAQKLYKRRKESILTIQKYYKA

SEQ ID NO: 35220 - protein, 43 aa, Artificial Sequence
  Quasi-synthetic sequence derived from human genome
FKCLYYLIWKNYKKYIIIAFILIILIIFLVLFIYTLPGAISRR

SEQ ID NO: 35221 - protein, 43 aa, Artificial Sequence
  Quasi-synthetic sequence derived from human genome
PLRSKKAVWHKLLSKQRKRAVVACFRMAPLYNLPRHRSINLFL

SEQ ID NO: 35222 - protein, 43 aa, Artificial Sequence
  Quasi-synthetic sequence derived from human genome
RIIRLVRVFRIFKLSRHSKGLQILGQTLKASMRELGLLIFFLF

SEQ ID NO: 35223 - protein, 43 aa, Artificial Sequence
  Quasi-synthetic sequence derived from human genome
RAVWSMMRYLRASSNRNFLLTMRPFLKRAILVLSYVLVILYFR

SEQ ID NO: 35224 - protein, 43 aa, Artificial Sequence
  Quasi-synthetic sequence derived from human genome
RKTCSQRRRRAMRAFRMLLYSKSTSLTFHWKLWGRHRGRRRGL

SEQ ID NO: 35225 - protein, 43 aa, Artificial Sequence
  Quasi-synthetic sequence derived from human genome
KVIKYIWRIGTDGRTVRRTMNIVPRTKVKTIKMFLILNLLFLL

SEQ ID NO: 35226 - protein, 43 aa, Artificial Sequence
  Quasi-synthetic sequence derived from human genome
TGFQKTRRWRGLGSLFRRACCVALPLQLLLLLFLLLLFLLPIR

SEQ ID NO: 35227 - protein, 43 aa, Artificial Sequence
  Quasi-synthetic sequence derived from human genome
TWSLRRRPARTLGLLLLVVLGFLVLRRLDWSTLVPLRLRHRQL

SEQ ID NO: 35228 - protein, 43 aa, Artificial Sequence
  Quasi-synthetic sequence derived from human genome
LPLLVMAICYTGIIKTLLRCPSKKKYKAIRLIFVIMAVFFIFW

SEQ ID NO: 35229 - protein, 43 aa, Artificial Sequence
  Quasi-synthetic sequence derived from human genome
RAYLVRKAFRHRLWAVLTVQAYARGMIARRLHQRLRAEYLWRL

SEQ ID NO: 35230 - protein, 43 aa, Artificial Sequence
  Quasi-synthetic sequence derived from human genome
WRAAVPIGLLVCLCLLQAFGYRLRRVIAAFYFPKREKKRILFL

SEQ ID NO: 35231 - protein, 43 aa, Artificial Sequence
  Quasi-synthetic sequence derived from human genome
LLSPSKIKTFLSLVWKRRILFFVVTLVSVFLVWKFTYAHKYLL

SEQ ID NO: 35232 - protein, 43 aa, Artificial Sequence
  Quasi-synthetic sequence derived from human genome
WRCRRLRAIYTIMRWFRRHKVRAHLAELQRRFQAARQPPLYGR

SEQ ID NO: 35233 - protein, 43 aa, Artificial Sequence
  Quasi-synthetic sequence derived from human genome
LIPFLIIVGICLILIVIFMITKFVQDRHRARRNRLRKDQLKKL

SEQ ID NO: 35234 - protein, 43 aa, Artificial Sequence
  Quasi-synthetic sequence derived from human genome
FLRLFRAARLIKLLRQGYTIRILLWTFVQSFKALPYVCLLIAM

SEQ ID NO: 35235 - protein, 43 aa, Artificial Sequence
  Quasi-synthetic sequence derived from human genome
RLFRAARLIKLLRQGYTIRILLWTFVQSFKALPYVCLLIAMLF

SEQ ID NO: 35236 - protein, 43 aa, Artificial Sequence
  Quasi-synthetic sequence derived from human genome
YWRRVLAQRKLLMLKKEKLEKVQNKAASLIQAMWRRYRAKKYL

SEQ ID NO: 35237 - protein, 43 aa, Artificial Sequence
  Quasi-synthetic sequence derived from human genome
LARLGLPARPWPRWLGVAALGLAAVALGTVAWRRAWPRRRRRL

SEQ ID NO: 35238 - protein, 43 aa, Artificial Sequence
  Quasi-synthetic sequence derived from human genome
LAKISRPKKRAKTITFSKNAVISKRGGKLCLLIRVANLRKSLL

SEQ ID NO: 35239 - protein, 43 aa, Artificial Sequence
  Quasi-synthetic sequence derived from human genome
KLYWWRFLSMWGMFSVITSYILFRATRKPLSGRTPRLVYKWFL

SEQ ID NO: 35240 - protein, 43 aa, Artificial Sequence
  Quasi-synthetic sequence derived from human genome
PSVLKLPVRSLTYFSARKGKRKTVKAVIDRFLRLHCGLWVRRK

SEQ ID NO: 35241 - protein, 43 aa, Artificial Sequence
  Quasi-synthetic sequence derived from human genome
MLYRFLARRTNSTFNQVVLKRLFMSRTNRPPLSLSRMIRKMKL

SEQ ID NO: 35242 - protein, 43 aa, Artificial Sequence
  Quasi-synthetic sequence derived from human genome
RYLAICRPLRARVLVTRRRVRALIAVLWAVALLSAGPFLFLVG

SEQ ID NO: 35243 - protein, 43 aa, Artificial Sequence
  Quasi-synthetic sequence derived from human genome
RPKTSFNWFVNPLKTFVFFIWRRYWRTLVLLLLVLLTVFLLLV

SEQ ID NO: 35244 - protein, 43 aa, Artificial Sequence
  Quasi-synthetic sequence derived from human genome
LALTSTALLFLLFFLTLRFSVVKRGRKKLLYIFKQPFMRPVQT

SEQ ID NO: 35245 - protein, 43 aa, Artificial Sequence
  Quasi-synthetic sequence derived from human genome
RKHLNKLRNIRYGFNTILVILIWRIFIARSQMARNIWYFVVSL

SEQ ID NO: 35246 - protein, 43 aa, Artificial Sequence
  Quasi-synthetic sequence derived from human genome
RKAFAKKQQQLSALKVLQRNCAAYLKLRHWQWWRVFTKVKPLL

SEQ ID NO: 35247 - protein, 43 aa, Artificial Sequence
  Quasi-synthetic sequence derived from human genome
KLFRAARLIKLLRQGYTIRILLWTFVQSFKALPYVCLLIAMLF

SEQ ID NO: 35248 - protein, 43 aa, Artificial Sequence
  Quasi-synthetic sequence derived from human genome
RRKMPSLGWLRKCYQQIDRRLRKNLKSLIIVHPSWFIRTLLAV

SEQ ID NO: 35249 - protein, 43 aa, Artificial Sequence
  Quasi-synthetic sequence derived from human genome
LLCVMNLIILVNLIHLFIFRKSNFIFDKLHKVGIKTRRQWRRS

SEQ ID NO: 35250 - protein, 43 aa, Artificial Sequence
  Quasi-synthetic sequence derived from human genome
PKSVWYRIAFWLQWFNSFVNPLLYPLCHKRFQKAFLKIFCIKK

SEQ ID NO: 35251 - protein, 43 aa, Artificial Sequence
  Quasi-synthetic sequence derived from human genome
ITLGLLVAGVLVLLVSLGVAIHLCCRRRRARLRFMKQLRLHPL

SEQ ID NO: 35252 - protein, 43 aa, Artificial Sequence
  Quasi-synthetic sequence derived from human genome
FYLLRIANFSNLIFLRIKRRVKSVVLVILLGPLLFLVCHLFVI

SEQ ID NO: 35253 - protein, 43 aa, Artificial Sequence
  Quasi-synthetic sequence derived from human genome
LWRRQIYAVATLRFLKLRRERRALLCLLLVLGIAFIPIILEKI

SEQ ID NO: 35254 - protein, 43 aa, Artificial Sequence
  Quasi-synthetic sequence derived from human genome
FFLFLLSATFNASFLLKLQKWTQKKEKGKKLSRMKLLLKHLTL

SEQ ID NO: 35255 - protein, 43 aa, Artificial Sequence
  Quasi-synthetic sequence derived from human genome
RYKKNLKALYVVHPTSFIKVLWNILKPLISHKFGKKVIYFNYL

SEQ ID NO: 35256 - protein, 43 aa, Artificial Sequence
  Quasi-synthetic sequence derived from human genome
LISSWFRGNMQKKCYGKIKASVLLIQAFVRGWKARKNYRKYFR

SEQ ID NO: 35257 - protein, 43 aa, Artificial Sequence
  Quasi-synthetic sequence derived from human genome
KTIFLLFMQSIATISLFLNILEIFHLGFKKIKRGLWGKYKLKK

SEQ ID NO: 35258 - protein, 43 aa, Artificial Sequence
  Quasi-synthetic sequence derived from human genome
RKAFAKRQQQLTAMKVLQRNCAAYLKLRNWQWWRLFTKVKPLL

SEQ ID NO: 35259 - protein, 43 aa, Artificial Sequence
  Quasi-synthetic sequence derived from human genome
RTLFRSRSKRRHRTVKLIFAIVVAYFLSWGPYNFTLFLQTLFR

SEQ ID NO: 35260 - protein, 43 aa, Artificial Sequence
  Quasi-synthetic sequence derived from human genome
LRKSLKIIYLNSIQQLEIRNMSWPRLIRKLRCYLKEMKNLRKL

SEQ ID NO: 35261 - protein, 43 aa, Artificial Sequence
  Quasi-synthetic sequence derived from human genome
FRGWVALVLHLRAHSAAKRPIACPKCERRFWRRKQLRAHLRRC

SEQ ID NO: 35262 - protein, 43 aa, Artificial Sequence
  Quasi-synthetic sequence derived from human genome
LSSKAAKDVLGFLRVVRFVRILRIFKLTRHFVGLRVLGHTLRA

SEQ ID NO: 35263 - protein, 43 aa, Artificial Sequence
  Quasi-synthetic sequence derived from human genome
WRFIRVFIKTIRRDIFGGLVLLKVKAKVRQCLQERRTVPILFA

SEQ ID NO: 35264 - protein, 43 aa, Artificial Sequence
  Quasi-synthetic sequence derived from human genome
LRVIRLVRVFRIFKLSRHSKGLQILGQTLKASMRELGLLIFFL

SEQ ID NO: 35265 - protein, 43 aa, Artificial Sequence
  Quasi-synthetic sequence derived from human genome
RRRRRLRRRPRGLRCSRLPPPPPLPLLLGLLLAAAGPGAARAK

SEQ ID NO: 35266 - protein, 43 aa, Artificial Sequence
  Quasi-synthetic sequence derived from human genome
IARALHTPQRVLPLKKPPMKSLRKKGSGKILTPAKKSFLRRLF

SEQ ID NO: 35267 - protein, 43 aa, Artificial Sequence
  Quasi-synthetic sequence derived from human genome
KCKTHCLATKKLDLWRLPPILIIHLKRFQFVNGRWIKSQKIVK

SEQ ID NO: 35268 - protein, 43 aa, Artificial Sequence
  Quasi-synthetic sequence derived from human genome
KYHRFLGRHFPRFYVLYTIFMKGLQMLWADAKKARRIKTNMWK

SEQ ID NO: 35269 - protein, 43 aa, Artificial Sequence
  Quasi-synthetic sequence derived from human genome
LNRKIVQVMRKQKTINRFLMRKRLLFPALVTLLISTLTFPPGF

SEQ ID NO: 35270 - protein, 43 aa, Artificial Sequence
  Quasi-synthetic sequence derived from human genome
RFRTLMMRRRFLSLKKTAILIQRKYRAHLCTKHHLQFLQVQNA

SEQ ID NO: 35271 - protein, 43 aa, Artificial Sequence
  Quasi-synthetic sequence derived from human genome
ALLRLLGLRRGLRRLRRLWAGPRVQRGRGRGRGRGWGPSRGCV

SEQ ID NO: 35272 - protein, 43 aa, Artificial Sequence
  Quasi-synthetic sequence derived from human genome
KLIRMGPQERWLLRTKRLHWSRLLFLLGMLIIGSTYQHLRRPR

SEQ ID NO: 35273 - protein, 43 aa, Artificial Sequence
  Quasi-synthetic sequence derived from human genome
LVRLLRLIILIRIFHLLHQKRQLEKLMRRLVSENKRRYTRDGF

SEQ ID NO: 35274 - protein, 43 aa, Artificial Sequence
  Quasi-synthetic sequence derived from human genome
KYKKNLKALYVVHPTSFIKVLWNILKPLISHKFGKKVIYFNYL

SEQ ID NO: 35275 - protein, 43 aa, Artificial Sequence
  Quasi-synthetic sequence derived from human genome
RKAFAKRQQQLTAMKVIQRNCAAYLKLRNWQWWRLFTKVKPLL

SEQ ID NO: 35276 - protein, 43 aa, Artificial Sequence
  Quasi-synthetic sequence derived from human genome
VKGKKCIVLVTELMTSGTLKTYLKRFKVMKIKVLRSWCRQILK

SEQ ID NO: 35277 - protein, 43 aa, Artificial Sequence
  Quasi-synthetic sequence derived from human genome
RIHLKLHFTCQRILFLKPSCMLEVITWPIQAFVKRKVIIFLKK

SEQ ID NO: 35278 - protein, 43 aa, Artificial Sequence
  Quasi-synthetic sequence derived from human genome
PHLLTLFHRLCKLLFFRIRPIFVFDGDAPLLKKQTLVKRRQRK

SEQ ID NO: 35279 - protein, 43 aa, Artificial Sequence
  Quasi-synthetic sequence derived from human genome
MKKLVPVRRRAWGQLCLPPQRLRVTRHPLIPAPVLGLLLLLLL

SEQ ID NO: 35280 - protein, 43 aa, Artificial Sequence
  Quasi-synthetic sequence derived from human genome
ECNFFLIAVRLASLNQILDPWVYLLLRKILLRKFCQMRKRRLR

SEQ ID NO: 35281 - protein, 43 aa, Artificial Sequence
  Quasi-synthetic sequence derived from human genome
IFQGCLYLIYNLLQAVFFVLFVLSVHYLWKKWKKHQKKLKKQA

SEQ ID NO: 35282 - protein, 43 aa, Artificial Sequence
  Quasi-synthetic sequence derived from human genome
AFRRLKAHNLCRQIRAACVIQSYWRMRQDRVRFLNLKKTIIKF

SEQ ID NO: 35283 - protein, 43 aa, Artificial Sequence
  Quasi-synthetic sequence derived from human genome
RRKVSKIQRFHARSLWTNHKRYGYKKHSYRLVKKLKLQKMKKN

SEQ ID NO: 35284 - protein, 43 aa, Artificial Sequence
  Quasi-synthetic sequence derived from human genome
FLRVVRFVRILRIFKLTRHFVGLRVLGHTLRASTNEFLLLIIF

SEQ ID NO: 35285 - protein, 43 aa, Artificial Sequence
  Quasi-synthetic sequence derived from human genome
FKIKQFLAKKQKQNRPIPQWIRMKTGNKIRYNSKRRHWKRTKL

SEQ ID NO: 35286 - protein, 43 aa, Artificial Sequence
  Quasi-synthetic sequence derived from human genome
LLTWKLILTFFKAASSQLRALYSMYLRKTKSLNKLLYHLFRLM

SEQ ID NO: 35287 - protein, 43 aa, Artificial Sequence
  Quasi-synthetic sequence derived from human genome
KRRKSNPKPLVLSEARKQLMIYRLPQVLRLHLKRFRWSGRNHR

SEQ ID NO: 35288 - protein, 43 aa, Artificial Sequence
  Quasi-synthetic sequence derived from human genome
LWCWWRRRGAAKAGPSGCRRWGQAISKSKLSRRWRRWNRFNRR

SEQ ID NO: 35289 - protein, 43 aa, Artificial Sequence
  Quasi-synthetic sequence derived from human genome
AFSRSKKKKKKKKKRQCFAFLIYFRLGIKMGKQGIINKEGYLY

SEQ ID NO: 35290 - protein, 43 aa, Artificial Sequence
  Quasi-synthetic sequence derived from human genome
RRPRIHFRFPNRPFVPSRCNHRFPFQPFYWPHRYLTYRYFPRR

SEQ ID NO: 35291 - protein, 43 aa, Artificial Sequence
  Quasi-synthetic sequence derived from human genome
KFKQWVIPWHLNKRYNRKRFFALPYVDHFLRLEREKRARIKAR

SEQ ID NO: 35292 - protein, 43 aa, Artificial Sequence
  Quasi-synthetic sequence derived from human genome
RYPLLLPKGVVLKLKPVATRFPRKAWRQKRSSVLKPLLIQPSP

SEQ ID NO: 35293 - protein, 43 aa, Artificial Sequence
  Quasi-synthetic sequence derived from human genome
MKIFKCYFKHTLQQKVFILFLTLWLLSLLKLLNVRRLFPQKDI

SEQ ID NO: 35294 - protein, 43 aa, Artificial Sequence
  Quasi-synthetic sequence derived from human genome
LRRQLQRQHKCAIIIQSYYRMHVQQKKWKIMKKAALLIQKYYR

SEQ ID NO: 35295 - protein, 43 aa, Artificial Sequence
  Quasi-synthetic sequence derived from human genome
RLRPRLHFCLVLLLLLVVPAAWGCGPGRVVGSRRRPPRKLVPL

SEQ ID NO: 35296 - protein, 43 aa, Artificial Sequence
  Quasi-synthetic sequence derived from human genome
LAKLKLFRHYYVLIVCYIYFTRIIAFLLKLAVPFQWKWLYQLL

SEQ ID NO: 35297 - protein, 43 aa, Artificial Sequence
  Quasi-synthetic sequence derived from human genome
KPIPVMLLGVTLLKKKYPLAKYLCVLLIVAGVALFMYKPKKVV

SEQ ID NO: 35298 - protein, 43 aa, Artificial Sequence
  Quasi-synthetic sequence derived from human genome
LSIQKVLRGYRYRKEFLRQRRAAVTLQAWWRGYCNRRNFKLIL

SEQ ID NO: 35299 - protein, 43 aa, Artificial Sequence
  Quasi-synthetic sequence derived from human genome
RFSCTQIWVKMYGYFAGLCRRLQKFWRVTVKGFFVKKKEKKIP

SEQ ID NO: 35300 - protein, 43 aa, Artificial Sequence
  Quasi-synthetic sequence derived from human genome
VLLLKKLKAWNDIKKVYASQRMRAGKGKMRNRRRIQRRGPCII

SEQ ID NO: 35301 - protein, 43 aa, Artificial Sequence
  Quasi-synthetic sequence derived from human genome
RRLQTQVFKLGLAKSIHHARVLIRQRHIRVRKQVVNIPSFIVR

SEQ ID NO: 35302 - protein, 43 aa, Artificial Sequence
  Quasi-synthetic sequence derived from human genome
KLMTQMRMGKKKRAMKGKKPSFMVIRFPGRRGYGRLRPRARSL

SEQ ID NO: 35303 - protein, 43 aa, Artificial Sequence
  Quasi-synthetic sequence derived from human genome
IFYLLKIANFSNLIFLRLKRRVKSVILVVLLGPLLFLACHLFV

SEQ ID NO: 35304 - protein, 43 aa, Artificial Sequence
  Quasi-synthetic sequence derived from human genome
IQYHSLDVIAFLLACVATVIFIITKFCLFCFRKLAKKGKKKKR

SEQ ID NO: 35305 - protein, 43 aa, Artificial Sequence
  Quasi-synthetic sequence derived from human genome
WWRLILSKILKKRRQAALEAFSRKEWAAVTLQSQARMWRIRRR

SEQ ID NO: 35306 - protein, 43 aa, Artificial Sequence
  Quasi-synthetic sequence derived from human genome
TRSIAIIVPLVLLVTLITTLVIGLVLCKRKRRTKTIRRQPIIN

SEQ ID NO: 35307 - protein, 43 aa, Artificial Sequence
  Quasi-synthetic sequence derived from human genome
LRTFRLLRVLKLVRFMPALRRQLVVLMKTMDNVATFCMLLMLF

SEQ ID NO: 35308 - protein, 43 aa, Artificial Sequence
  Quasi-synthetic sequence derived from human genome
FLSRRRRARSSVCRRKVAQAREKRFTFVLAVVMGVFVLCWFPF

SEQ ID NO: 35309 - protein, 43 aa, Artificial Sequence
  Quasi-synthetic sequence derived from human genome
RFKRSYNYKTIVKKILAKLKRARSKKLDNFQSEKKVFKKSFLR

SEQ ID NO: 35310 - protein, 43 aa, Artificial Sequence
  Quasi-synthetic sequence derived from human genome
LLLLLVVCGIGCVWHWKHRVATRFTLPRFLQRRSSRRKVCTKT

SEQ ID NO: 35311 - protein, 43 aa, Artificial Sequence
  Quasi-synthetic sequence derived from human genome
FLKLKNAATLIQRHWRGHNCRKNYGLMRLGFLRLQALHRSRKL

SEQ ID NO: 35312 - protein, 43 aa, Artificial Sequence
  Quasi-synthetic sequence derived from human genome
KLCSRFLLKCGFITIPWRCIKKCSPLMPRAAVPRFVQQKLYLF

SEQ ID NO: 35313 - protein, 43 aa, Artificial Sequence
  Quasi-synthetic sequence derived from human genome
IVSQRKQIKRKAPRGFLKRVFKRKKPQLRLEKSGDLLVRFHPF

SEQ ID NO: 35314 - protein, 43 aa, Artificial Sequence
  Quasi-synthetic sequence derived from human genome
LFCTTVFTLLLLSIVILYCRIYSLVRTRSRRLTFRKNISKASR

SEQ ID NO: 35315 - protein, 43 aa, Artificial Sequence
  Quasi-synthetic sequence derived from human genome
PLMMYEKLSMIRFRYRILRSQHFRTKSKVCKLRKAQRSWVQKV

SEQ ID NO: 35316 - protein, 43 aa, Artificial Sequence
  Quasi-synthetic sequence derived from human genome
ILGLTGLYGFIFYLLASVLLSLLLILKAGRRWNKYFKSRRPLF

SEQ ID NO: 35317 - protein, 43 aa, Artificial Sequence
  Quasi-synthetic sequence derived from human genome
KGRLKHRGSSLHPFRKGLQEKDKVWLLREQKRKKKLRKLLKRL

SEQ ID NO: 35318 - protein, 43 aa, Artificial Sequence
  Quasi-synthetic sequence derived from human genome
SQIPKRKRKAKKRRKNDVVVVKGKLKLCSISGLIALCGILVLL

SEQ ID NO: 35319 - protein, 43 aa, Artificial Sequence
  Quasi-synthetic sequence derived from human genome
IRASAVGLLGTLVRRGRGGLRLGLRGPLRKLVLQSLVPLLLRL

SEQ ID NO: 35320 - protein, 43 aa, Artificial Sequence
  Quasi-synthetic sequence derived from human genome
KFFLYVCMYVCIREKILLYKTHWMTPIFLKVVINTRRIKHHFK

SEQ ID NO: 35321 - protein, 43 aa, Artificial Sequence
  Quasi-synthetic sequence derived from human genome
RMIDYRHFVPQMPFVPAVAKSIPRKRISLKRPKKCFRNLFHIR

SEQ ID NO: 35322 - protein, 43 aa, Artificial Sequence
  Quasi-synthetic sequence derived from human genome
KVSGILQRVLLLFRAAQCSFPVAQWYILQLRWARKVMQKIRMK

SEQ ID NO: 35323 - protein, 43 aa, Artificial Sequence
  Quasi-synthetic sequence derived from human genome
LNRFVQLSGRPHLPGKKKIRWDPVRRRFIQSCPIIRIPNRFLR

SEQ ID NO: 35324 - protein, 43 aa, Artificial Sequence
  Quasi-synthetic sequence derived from human genome
KVAARMVWRLLHGQVLTRRERRRLLRTCVDFFRLVPFMVFLIV

SEQ ID NO: 35325 - protein, 43 aa, Artificial Sequence
  Quasi-synthetic sequence derived from human genome
RSALFALRYNILTLMRMLSLKSLKKQMKKVKKMTVKDMVTAFF

SEQ ID NO: 35326 - protein, 43 aa, Artificial Sequence
  Quasi-synthetic sequence derived from human genome
LLQKLLKDGGVLSPILTRLMNFFVFSRGLLQYINQRKKFRRRW

SEQ ID NO: 35327 - protein, 43 aa, Artificial Sequence
  Quasi-synthetic sequence derived from human genome
MGKATGRKAPLWLRAKFQRLLFKLGCYIQKNCGKFLVVGLLIF

SEQ ID NO: 35328 - protein, 43 aa, Artificial Sequence
  Quasi-synthetic sequence derived from human genome
LRVMRLMRIFRILKLARHSTGLRAFGFTLRQCYQQVGCLLLFI

SEQ ID NO: 35329 - protein, 43 aa, Artificial Sequence
  Quasi-synthetic sequence derived from human genome
RILAVITIQAGVRGYLARRRIRLWHRGAMVIQATWRGYRVRRN

SEQ ID NO: 35330 - protein, 43 aa, Artificial Sequence
  Quasi-synthetic sequence derived from human genome
ALYRYFVELWIYLGLAWLSLFVNWKVSMFVEVHKAIKKRRRRR

SEQ ID NO: 35331 - protein, 43 aa, Artificial Sequence
  Quasi-synthetic sequence derived from human genome
RHLGVVIGILVAVILLLLLLLLLFLILRHRRQGKHWTSTQRKA

SEQ ID NO: 35332 - protein, 43 aa, Artificial Sequence
  Quasi-synthetic sequence derived from human genome
IFFAFVLLLSGALAYCLALQLYVRRRKKLPSVLLFKKPSPFIF

SEQ ID NO: 35333 - protein, 43 aa, Artificial Sequence
  Quasi-synthetic sequence derived from human genome
IKSFFRQLNLYGFRKRRQCTFRTFTRIFSAKRLVSILNKLEFY

SEQ ID NO: 35334 - protein, 43 aa, Artificial Sequence
  Quasi-synthetic sequence derived from human genome
MKHFLRMLIQVCLYFYCKFLWRCLKFVMRKLTGRCELQRICYN

SEQ ID NO: 35335 - protein, 43 aa, Artificial Sequence
  Quasi-synthetic sequence derived from human genome
LKGKKCIVLVTELMTSGTLKTYLKRFKVMKPKVLRSWCRQILK

SEQ ID NO: 35336 - protein, 43 aa, Artificial Sequence
  Quasi-synthetic sequence derived from human genome
KLIRRRPFRQIQVLEPLNLLITISGHKNRLRVYHLTWLRNKIL

SEQ ID NO: 35337 - protein, 43 aa, Artificial Sequence
  Quasi-synthetic sequence derived from human genome
RARRGLRGLLMAHSQRLLFRIGYSLYTRTWLGYLFYRQQLRRA

SEQ ID NO: 35338 - protein, 43 aa, Artificial Sequence
  Quasi-synthetic sequence derived from human genome
CGKYLKVFYKFINLNRYKIRHTRKKPFKCKNCVKSFCMFSHKT

SEQ ID NO: 35339 - protein, 43 aa, Artificial Sequence
  Quasi-synthetic sequence derived from human genome
YKQRLLFAKLFGHLTSARRARKSEVPHFRLKKVQNIKMWLSLR

SEQ ID NO: 35340 - protein, 43 aa, Artificial Sequence
  Quasi-synthetic sequence derived from human genome
LKFHIRRFIFLFFILVIGIYPSGHSLILILGNPKLKQNAKKFL

SEQ ID NO: 35341 - protein, 43 aa, Artificial Sequence
  Quasi-synthetic sequence derived from human genome
IILKLYRVLQLFLSRTAQRSALLSSGRLLRRLGLLLLPVLGFL

SEQ ID NO: 35342 - protein, 43 aa, Artificial Sequence
  Quasi-synthetic sequence derived from human genome
RKVRRKEPKSQDIYLRLLVKLYRFLARRTNSTFNQVVLKRLFM

SEQ ID NO: 35343 - protein, 43 aa, Artificial Sequence
  Quasi-synthetic sequence derived from human genome
LRTAMRRQMRRHASRRGPSRRRLGRLWNRLFHRPRAPRGQIPL

SEQ ID NO: 35344 - protein, 43 aa, Artificial Sequence
  Quasi-synthetic sequence derived from human genome
AFQGLSLLLLLLTFVLPLVVTLFCYCRISRRLRRPPHVGRARR

SEQ ID NO: 35345 - protein, 43 aa, Artificial Sequence
  Quasi-synthetic sequence derived from human genome
VLDVANHFSRLKIHFTKVFSAFALVRTIRYLYRRLQRMLGLRR

SEQ ID NO: 35346 - protein, 43 aa, Artificial Sequence
  Quasi-synthetic sequence derived from human genome
AVKIQAWWRGTLVRRTLLHAALRAWIIQCWWRMTLSRVLEKKR

SEQ ID NO: 35347 - protein, 43 aa, Artificial Sequence
  Quasi-synthetic sequence derived from human genome
RRELSLGRKKAPHRLCGRFSRISMKLPRIPLRRQKLPKVVVAH

SEQ ID NO: 35348 - protein, 43 aa, Artificial Sequence
  Quasi-synthetic sequence derived from human genome
MFFNKDLRRNKAALLFWHILLLGPIVRCLHTIRNYHKWLKNLK

SEQ ID NO: 35349 - protein, 43 aa, Artificial Sequence
  Quasi-synthetic sequence derived from human genome
RVLFYLGPVYLAGYLGLSITWLLLGALLWMWWRRNRRGKLGRL

SEQ ID NO: 35350 - protein, 43 aa, Artificial Sequence
  Quasi-synthetic sequence derived from human genome
FAKLFSHITSARKARKYEIPHFRLKKVENIKIWLSLRSYLKRR

SEQ ID NO: 35351 - protein, 43 aa, Artificial Sequence
  Quasi-synthetic sequence derived from human genome
LFLLILLTGVLCHRFHGLWYMKMMWAWLQAKRKPRKAPSRNIC

SEQ ID NO: 35352 - protein, 43 aa, Artificial Sequence
  Quasi-synthetic sequence derived from human genome
LPAKASRSKTRLKSQLLLQKYIAQRKWKKHFYVVTAANRLRKF

SEQ ID NO: 35353 - protein, 43 aa, Artificial Sequence
  Quasi-synthetic sequence derived from human genome
RPRVFIKDMAPGKVVPMNCWGVYQAVRWLRWKASLIKLRALRR

SEQ ID NO: 35354 - protein, 43 aa, Artificial Sequence
  Quasi-synthetic sequence derived from human genome
IAVVVFHFLVPMIIVIFCYLRIWILVLQVRQRVKPDRKPKLKP

SEQ ID NO: 35355 - protein, 43 aa, Artificial Sequence
  Quasi-synthetic sequence derived from human genome
RRAIVFTRQLVTYIVVGVTLRPAILVIPCLLLIKCHLKLYRTK

SEQ ID NO: 35356 - protein, 43 aa, Artificial Sequence
  Quasi-synthetic sequence derived from human genome
RRRSRSVVRRRSFSISPVRLRRSRTPLRRRFSRSPIRRKRSRS

SEQ ID NO: 35357 - protein, 43 aa, Artificial Sequence
  Quasi-synthetic sequence derived from human genome
IMRNILGLVLPLLIMVICYSGILKTLLRCRNEKKRHRAVRVIF

SEQ ID NO: 35358 - protein, 43 aa, Artificial Sequence
  Quasi-synthetic sequence derived from human genome
RFVVRKTVQRSVAKGSRRCKKRMFKFHQMKHIFEILDKMRCLR

SEQ ID NO: 35359 - protein, 43 aa, Artificial Sequence
  Quasi-synthetic sequence derived from human genome
LVILLVIYVSWKRYPASMKQLQQRSLMRRHRKKKRQSLKQMTP

SEQ ID NO: 35360 - protein, 43 aa, Artificial Sequence
  Quasi-synthetic sequence derived from human genome
CAVRAMLYSRAVRNLKKKLLPWQRRGLLRAQGLRGWKARRATT

SEQ ID NO: 35361 - protein, 43 aa, Artificial Sequence
  Quasi-synthetic sequence derived from human genome
LLLVVVTWRVCQKSHCFRLGRQLSKALQVNCVVRKLLVQLRRL

SEQ ID NO: 35362 - protein, 43 aa, Artificial Sequence
  Quasi-synthetic sequence derived from human genome
LYACKKLNKKRLKKRKGYQGAMVEKKILMKVHSRFIVSLAYAF

SEQ ID NO: 35363 - protein, 43 aa, Artificial Sequence
  Quasi-synthetic sequence derived from human genome
VRTSVSVIIALRRAVKRHRERRERQKRVFRMSLLIISTFLLCW

SEQ ID NO: 35364 - protein, 43 aa, Artificial Sequence
  Quasi-synthetic sequence derived from human genome
WRFLVIWILFSAVTAFVTFRATRKPLVQTTPRLVYKWFLLIYK

SEQ ID NO: 35365 - protein, 43 aa, Artificial Sequence
  Quasi-synthetic sequence derived from human genome
KIIRTIFKRLKSFICPKLHMGFKSSLRSQLSKYTAKIVNIVLC

SEQ ID NO: 35366 - protein, 43 aa, Artificial Sequence
  Quasi-synthetic sequence derived from human genome
LYFNPWMRIFIQAKRVKTKHLCYCLYRPRKYLYVTSSFKGAFK

SEQ ID NO: 35367 - protein, 43 aa, Artificial Sequence
  Quasi-synthetic sequence derived from human genome
LRKPKRVPSIYKLKLRPRIRPRRDHRPEKQPSRIPRPLAYVFL

SEQ ID NO: 35368 - protein, 43 aa, Artificial Sequence
  Quasi-synthetic sequence derived from human genome
VPSHRRKIFPGLILSDIKPAKRMKFKTVCYLLVQLMHCRKMFK

SEQ ID NO: 35369 - protein, 43 aa, Artificial Sequence
  Quasi-synthetic sequence derived from human genome
VSACIPVFRLARRRKKILFYCHFPDLLLTKRDSFLKRLYRAPI

SEQ ID NO: 35370 - protein, 43 aa, Artificial Sequence
  Quasi-synthetic sequence derived from human genome
KRCIVLVTELMTSGTLKTYLKRFKVMKPKVLRSWCRQILKGLL

SEQ ID NO: 35371 - protein, 43 aa, Artificial Sequence
  Quasi-synthetic sequence derived from human genome
IYFIHSLCLLGRLLIYKQGRKLFPIKLKNKKGLVSLIDLLVLF

SEQ ID NO: 35372 - protein, 43 aa, Artificial Sequence
  Quasi-synthetic sequence derived from human genome
LAFRKAKIRDRVSKLLASVILLPWPPKVLGLKNVTGRLLVGLR

SEQ ID NO: 35373 - protein, 43 aa, Artificial Sequence
  Quasi-synthetic sequence derived from human genome
WWRMTLSRVLEKKRQAALIAYATRERAVIKLQSLVRMWRVRWR

SEQ ID NO: 35374 - protein, 43 aa, Artificial Sequence
  Quasi-synthetic sequence derived from human genome
RFLCGFLVPVLIITACYLTIVCKLQRNRLAKTKKPFKIIVTII

SEQ ID NO: 35375 - protein, 43 aa, Artificial Sequence
  Quasi-synthetic sequence derived from human genome
LRMKIKEVKKENGDKKIVPKKKKPLKLGPIKKKDLKKLVLYLK

SEQ ID NO: 35376 - protein, 43 aa, Artificial Sequence
  Quasi-synthetic sequence derived from human genome
LRVKLTVRYKRVTTHRRIWLALGLCWLVSFLVGLTPMFGWNMK

SEQ ID NO: 35377 - protein, 43 aa, Artificial Sequence
  Quasi-synthetic sequence derived from human genome
FTIKRFLAKKQKQNRPIPQWIQMKPGSKIRYNSKRRHWRRTKL

SEQ ID NO: 35378 - protein, 43 aa, Artificial Sequence
  Quasi-synthetic sequence derived from human genome
ILLVVAVFCILWNWNKRKKRQVPYLRVTVMPLLTLPQTRQRAK

SEQ ID NO: 35379 - protein, 43 aa, Artificial Sequence
  Quasi-synthetic sequence derived from human genome
LKAKKAQLMQYLSLPKTPKMLKMSKGLDARSKRWLKIIWRRHG

SEQ ID NO: 35380 - protein, 43 aa, Artificial Sequence
  Quasi-synthetic sequence derived from human genome
RPRRRFLCHLSRQQLRMAMRIPVLYEQLKREKLRVHKARQWKY

SEQ ID NO: 35381 - protein, 43 aa, Artificial Sequence
  Quasi-synthetic sequence derived from human genome
PLLVLALASYRRLCLRLRLADCLVPYSRALYRRRRAPQPRQIR

SEQ ID NO: 35382 - protein, 43 aa, Artificial Sequence
  Quasi-synthetic sequence derived from human genome
IWIRTKPSDIIRKYISKYSVFLRHRYQSRSAFLGRYLKKKKSV

SEQ ID NO: 35383 - protein, 43 aa, Artificial Sequence
  Quasi-synthetic sequence derived from human genome
LPLLVMIICYTGIIKILLRRPNEKKSKAVRLIFVIMIIFFLFW

SEQ ID NO: 35384 - protein, 43 aa, Artificial Sequence
  Quasi-synthetic sequence derived from human genome
LRLQIIQRERRRKELFRKKNKAAAVIQRAWRSYQLRKHLSHLR

SEQ ID NO: 35385 - protein, 43 aa, Artificial Sequence
  Quasi-synthetic sequence derived from human genome
LLWKRLLIARRSRKGFFAQIVLPAVFVCIALVFSLIVPPFGKY

SEQ ID NO: 35386 - protein, 43 aa, Artificial Sequence
  Quasi-synthetic sequence derived from human genome
LKKKLFKRRRVLNRERRLRHRVVGAVIDQGLITRHHLKKRASS

SEQ ID NO: 35387 - protein, 43 aa, Artificial Sequence
  Quasi-synthetic sequence derived from human genome
ILQIRKLRHRLSNFPRLPGILAPETVLLPFCYKVFRKKEKVKR

SEQ ID NO: 35388 - protein, 43 aa, Artificial Sequence
  Quasi-synthetic sequence derived from human genome
RTIFLVLLFSQYARNVKFPLPIYKSKKGWTAYKLQLFKMFPII

SEQ ID NO: 35389 - protein, 43 aa, Artificial Sequence
  Quasi-synthetic sequence derived from human genome
RRIRAAVVLQKHYRMQRARQAYQRVRRAAVVIQAFTRAMFVRR

SEQ ID NO: 35390 - protein, 43 aa, Artificial Sequence
  Quasi-synthetic sequence derived from human genome
AMRRIRYEFKAKNIKKKKVSIMVSVDGVKVILKKKKKKKEWTW

SEQ ID NO: 35391 - protein, 43 aa, Artificial Sequence
  Quasi-synthetic sequence derived from human genome
RLARHDRGNYVRLNMKQKHYVRGRALRSRLLRKQAWKQKWRKK

SEQ ID NO: 35392 - protein, 43 aa, Artificial Sequence
  Quasi-synthetic sequence derived from human genome
MKKFLYIKSVFHTLRMAQRRHKRVRTWTRHINIFNKDYIFVPV

SEQ ID NO: 35393 - protein, 43 aa, Artificial Sequence
  Quasi-synthetic sequence derived from human genome
RVAKKRAPKVLGTTLVVGLLAGVGYFAFMLFRKRLGSMILAFR

SEQ ID NO: 35394 - protein, 43 aa, Artificial Sequence
  Quasi-synthetic sequence derived from human genome
RKIMRKVTTLPNTLVENTALPRQRARKRTKVLSLAKRILRFKK

SEQ ID NO: 35395 - protein, 43 aa, Artificial Sequence
  Quasi-synthetic sequence derived from human genome
TLLSLKKNKIHSLPDKVFIKYTKLKKIFLQHNCIRHISRKAFF

SEQ ID NO: 35396 - protein, 43 aa, Artificial Sequence
  Quasi-synthetic sequence derived from human genome
FKKFYFHQHLCILKAKLGRPVTWNRQLRHFQGRKKALQIQKTW

SEQ ID NO: 35397 - protein, 43 aa, Artificial Sequence
  Quasi-synthetic sequence derived from human genome
GKRLFVIRPSRFYDRRFLKLLRFYIALTGIPVAIFITLVNVFI

SEQ ID NO: 35398 - protein, 43 aa, Artificial Sequence
  Quasi-synthetic sequence derived from human genome
RELTKIPIFSLFRKWKAFSVWRKNVRSKKITGCQKSLQKNLFI

SEQ ID NO: 35399 - protein, 43 aa, Artificial Sequence
  Quasi-synthetic sequence derived from human genome
RARGYLARQRYQQMRRSLVKFRSLVHAYVSRRRYLKLRAEWRC

SEQ ID NO: 35400 - protein, 43 aa, Artificial Sequence
  Quasi-synthetic sequence derived from human genome
KLHRVLKVFLSRTAQRIPYMTGGRVMRMLAVILLVVFWFLIGW

SEQ ID NO: 35401 - protein, 43 aa, Artificial Sequence
  Quasi-synthetic sequence derived from human genome
VLAPWPRPPPRRFSPPRRMLPPPPMWRRSPPRMRRRSRSPRRR

SEQ ID NO: 35402 - protein, 43 aa, Artificial Sequence
  Quasi-synthetic sequence derived from human genome
VFMFCKAIRFSYPSIHPFILIWGNKKLKQTFLSVLRQVRYWVK

SEQ ID NO: 35403 - protein, 43 aa, Artificial Sequence
  Quasi-synthetic sequence derived from human genome
RKRFFALPYVDHFLRLEREKRARIKARKENLERKKAKILLKKF

SEQ ID NO: 35404 - protein, 43 aa, Artificial Sequence
  Quasi-synthetic sequence derived from human genome
LVKRLHKVLRPFLLRRVKVDVEKQMPKKYEHVIRCRLSKRQRC

SEQ ID NO: 35405 - protein, 43 aa, Artificial Sequence
  Quasi-synthetic sequence derived from human genome
LKRSIKLLSLIKWKGSKSSKLNSKFWKHLVYEMPIKKKEMLPR

SEQ ID NO: 35406 - protein, 43 aa, Artificial Sequence
  Quasi-synthetic sequence derived from human genome
MKTLRLRKNTVKFSLYRHFKNTLIFAVLASIVFMGWTTKTFRI

SEQ ID NO: 35407 - protein, 43 aa, Artificial Sequence
  Quasi-synthetic sequence derived from human genome
LLWKNVTLKRRSPWVLAFEIFIPLVLFFILLGLRQKKPTISVK

SEQ ID NO: 35408 - protein, 43 aa, Artificial Sequence
  Quasi-synthetic sequence derived from human genome
RIGRILRLVRAARGIRTLLFALMMSLPSLFNIGLLLFLIMFIY

SEQ ID NO: 35409 - protein, 43 aa, Artificial Sequence
  Quasi-synthetic sequence derived from human genome
MLQWRRRHCCFAKMTWNAKRSLFRTHLIGVLSLVFLFAMFLFF

SEQ ID NO: 35410 - protein, 43 aa, Artificial Sequence
  Quasi-synthetic sequence derived from human genome
KLGVCANGLLIYKDRLRINRFAWPKILKISYKRSNFYIKVRPA

SEQ ID NO: 35411 - protein, 43 aa, Artificial Sequence
  Quasi-synthetic sequence derived from human genome
MAFRALGVATQTAIAAAIALLALTALLLVAMICRRRRRRKKAR

SEQ ID NO: 35412 - protein, 43 aa, Artificial Sequence
  Quasi-synthetic sequence derived from human genome
LKVKQAMLQLYVLKLLKLQTKYLGRQWRKSNMKTMSAIYQKVR

SEQ ID NO: 35413 - protein, 43 aa, Artificial Sequence
  Quasi-synthetic sequence derived from human genome
KRRMSVGQQTWALLCKNCLKKWRMKRQTLLEWLFSFLLVLFLY

SEQ ID NO: 35414 - protein, 43 aa, Artificial Sequence
  Quasi-synthetic sequence derived from human genome
WICQVCRPKKKGRKLLHEKAAQIKRRYAKPIGRPKNKLKQRLL

SEQ ID NO: 35415 - protein, 43 aa, Artificial Sequence
  Quasi-synthetic sequence derived from human genome
GVLLFSKLVLKLPWTQVGFSLLFLYLGSGGWRFIRVFIKTIRR

SEQ ID NO: 35416 - protein, 43 aa, Artificial Sequence
  Quasi-synthetic sequence derived from human genome
LHKDSQQKTVKKKIKPTLPLRIFINVSRFFCVQLKKMVRLMYI

SEQ ID NO: 35417 - protein, 43 aa, Artificial Sequence
  Quasi-synthetic sequence derived from human genome
LWELYRELGLFQGPALGLRNHLGRKLRRRKKKKAKRTTNWKII

SEQ ID NO: 35418 - protein, 43 aa, Artificial Sequence
  Quasi-synthetic sequence derived from human genome
LYWKAQRYRLIREFHSRPALAPPFIVISHLRLLLRQLCRRPRS

SEQ ID NO: 35419 - protein, 43 aa, Artificial Sequence
  Quasi-synthetic sequence derived from human genome
LRFPVFLAILINFFIFVRIVQLLVAKLRARQMHHTDYKFRLAK

SEQ ID NO: 35420 - protein, 43 aa, Artificial Sequence
  Quasi-synthetic sequence derived from human genome
ILVGVLLLFVLLLVVRRRRREQRLKRLRDAKSLAEMLMSKNTR

SEQ ID NO: 35421 - protein, 43 aa, Artificial Sequence
  Quasi-synthetic sequence derived from human genome
LRGARVITPEDLLFLMRKDKKKLRRLLKYMFIRDYKSKIVKGI

SEQ ID NO: 35422 - protein, 43 aa, Artificial Sequence
  Quasi-synthetic sequence derived from human genome
RGKMMQRRPRSAEVKYFYFFKILLRLRLAILKYLFIDDKGILF

SEQ ID NO: 35423 - protein, 43 aa, Artificial Sequence
  Quasi-synthetic sequence derived from human genome
IIIQKHCRGYLVRSLYQLIRMATITMQAYSRGFLARRRYRKML

SEQ ID NO: 35424 - protein, 43 aa, Artificial Sequence
  Quasi-synthetic sequence derived from human genome
KKPRTFIIKLIKWLMIAIPATFVNSAIRYLECKLALAFRTRLV

SEQ ID NO: 35425 - protein, 43 aa, Artificial Sequence
  Quasi-synthetic sequence derived from human genome
FRWMRLRIRRMADAWIQAIKSLAEKQNLEKRKRKKVLVHLGLL

SEQ ID NO: 35426 - protein, 43 aa, Artificial Sequence
  Quasi-synthetic sequence derived from human genome
RFLARRTNSTFNQVVLKRLFMSRTNRPPLSLSRMIRKMKLPGR

SEQ ID NO: 35427 - protein, 43 aa, Artificial Sequence
  Quasi-synthetic sequence derived from human genome
PLFALLSRGRRRRMHVLRRRWDLGSLCRALLTRGLAALGHSLK

SEQ ID NO: 35428 - protein, 43 aa, Artificial Sequence
  Quasi-synthetic sequence derived from human genome
LWALSLLLGVARSLWMLLKLRQRLRSPTAPFTSPLPRGKRRAM

SEQ ID NO: 35429 - protein, 43 aa, Artificial Sequence
  Quasi-synthetic sequence derived from human genome
LRQLALLLWKNYTLQKRKVLVTVLELFLPLLFSGILIWLRLKI

SEQ ID NO: 35430 - protein, 43 aa, Artificial Sequence
  Quasi-synthetic sequence derived from human genome
IFWIVFLLLIVFYTAITKKIFKSHLKSSRNSTSVKKKSSRNIF

SEQ ID NO: 35431 - protein, 43 aa, Artificial Sequence
  Quasi-synthetic sequence derived from human genome
FVTMLKMVWISKASAIQRKGRAGRCRPGICFRLFSRLRFQNML

SEQ ID NO: 35432 - protein, 43 aa, Artificial Sequence
  Quasi-synthetic sequence derived from human genome
KNLLCLFCLKLFKTAIPYMNHCWRHSRRRVLQCSKCRLQFLTL

SEQ ID NO: 35433 - protein, 43 aa, Artificial Sequence
  Quasi-synthetic sequence derived from human genome
QRRMFHATVATQTQFFHVKVLNINLKRKFIKKRIIIISNYSKR

SEQ ID NO: 35434 - protein, 43 aa, Artificial Sequence
  Quasi-synthetic sequence derived from human genome
AKIQDYHILTRKRIRYRFRRFIQQFSQCKATARNLKLKYLINL

SEQ ID NO: 35435 - protein, 43 aa, Artificial Sequence
  Quasi-synthetic sequence derived from human genome
KKQRLSKKLRRKLQMWLWSQTFCPVLYAWNDLGSRFWPRYVKV

SEQ ID NO: 35436 - protein, 43 aa, Artificial Sequence
  Quasi-synthetic sequence derived from human genome
FKNKDHFQFTNLFLCGLLSKAKQKLLRHLVPAAALRRKRKALW

SEQ ID NO: 35437 - protein, 43 aa, Artificial Sequence
  Quasi-synthetic sequence derived from human genome
RYYRLAPMRLYTLSKRHFVLVFVVFFICFGLTIFVGIRGPKVI

SEQ ID NO: 35438 - protein, 43 aa, Artificial Sequence
  Quasi-synthetic sequence derived from human genome
IVSYLFAKSNTVYNPVIYVFMIRKFRRSLLQLLCLRLLRCQRP

SEQ ID NO: 35439 - protein, 43 aa, Artificial Sequence
  Quasi-synthetic sequence derived from human genome
RPKRYFTIVIISSSLLLGLIVLLLISYVMWKAGFFKRQYKSIL

SEQ ID NO: 35440 - protein, 43 aa, Artificial Sequence
  Quasi-synthetic sequence derived from human genome
FNSKVALFAAVGAGCVIFLLIIIFLTVLLLKLRKRHRKHTQQR

SEQ ID NO: 35441 - protein, 43 aa, Artificial Sequence
  Quasi-synthetic sequence derived from human genome
LALPLVAMAAGGRWVRQQGPRVRRGISRLWLRVLLRLSPMAFR

SEQ ID NO: 35442 - protein, 43 aa, Artificial Sequence
  Quasi-synthetic sequence derived from human genome
KMRQAWKSWLIYVVVRRTKLQMQTTALEFRQRIILRVWWSTWR

SEQ ID NO: 35443 - protein, 43 aa, Artificial Sequence
  Quasi-synthetic sequence derived from human genome
LFFLWLWTSFNTAFLALQSLRFGFGFRRGRSFLLRSWHHLMKR

SEQ ID NO: 35444 - protein, 43 aa, Artificial Sequence
  Quasi-synthetic sequence derived from human genome
FKFFFWIGYCNSSLNPVIYTVFNQDFRRSFKHILFRRRRRGFR

SEQ ID NO: 35445 - protein, 43 aa, Artificial Sequence
  Quasi-synthetic sequence derived from human genome
KLKRNMMPWALQKKREIHMAKAHRRRAARSALPMRLTSCIFRR

SEQ ID NO: 35446 - protein, 43 aa, Artificial Sequence
  Quasi-synthetic sequence derived from human genome
IKIFRFVAPLYYINKECFKSALYKQTVNPILIKVAWKKAAKRK

SEQ ID NO: 35447 - protein, 43 aa, Artificial Sequence
  Quasi-synthetic sequence derived from human genome
LRRVLVLMASKHAFLALCALRFKRKIIGLKDEFYNRYIMKSFL

SEQ ID NO: 35448 - protein, 43 aa, Artificial Sequence
  Quasi-synthetic sequence derived from human genome
RAVAIVRLVLGFLWPLLTLTICYTFILLRTWSRRATRSTKTLK

SEQ ID NO: 35449 - protein, 43 aa, Artificial Sequence
  Quasi-synthetic sequence derived from human genome
CRRTRSGVGWKRVLRSLCHSRTRVPLLAAIYFLMIHVLLILCF

SEQ ID NO: 35450 - protein, 43 aa, Artificial Sequence
  Quasi-synthetic sequence derived from human genome
ILFLTCISVHRCLGVLRPLRSLRWGRARYARRVAGAVWVLVLA

SEQ ID NO: 35451 - protein, 43 aa, Artificial Sequence
  Quasi-synthetic sequence derived from human genome
IVLAKKMLRKALKLLNRIFPYNLISLFLHIHVEKNRHFHYVNR

SEQ ID NO: 35452 - protein, 43 aa, Artificial Sequence
  Quasi-synthetic sequence derived from human genome
VVTAVLILLVVRRLRVPKTPAPDGPRYRFRKRDKVLFYGRKIM

SEQ ID NO: 35453 - protein, 43 aa, Artificial Sequence
  Quasi-synthetic sequence derived from human genome
CLHVVLSSKVCRGYLVKMGGKIKSWKKRWFVFDRLKRTLSYYV

SEQ ID NO: 35454 - protein, 43 aa, Artificial Sequence
  Quasi-synthetic sequence derived from human genome
LLIISSILGSVWLAYKTPKLLRTARGRRIKKCATQLCRRCKTV

SEQ ID NO: 35455 - protein, 43 aa, Artificial Sequence
  Quasi-synthetic sequence derived from human genome
RRAFQKRQQQQSALRVMQRNCAAYLKLRHWQWWRLFTKVKPLL

SEQ ID NO: 35456 - protein, 43 aa, Artificial Sequence
  Quasi-synthetic sequence derived from human genome
IVIALLFLCLLPLIVKHIRKKQAKKAAAIRAKKSSKVRASQEL

SEQ ID NO: 35457 - protein, 43 aa, Artificial Sequence
  Quasi-synthetic sequence derived from human genome
RLRAVRLRSGAKALGKARRKVTVLVLVVLAVCLLCWTPFHLAS

SEQ ID NO: 35458 - protein, 43 aa, Artificial Sequence
  Quasi-synthetic sequence derived from human genome
TANPWNTIALLCGAFLALFKAAEFAKLSIKWMIKIRKRYLKRR

SEQ ID NO: 35459 - protein, 43 aa, Artificial Sequence
  Quasi-synthetic sequence derived from human genome
VNIPLFRRFGRQRKIGGRGRIISPYRTPVLRRHRYSIFRSTTR

SEQ ID NO: 35460 - protein, 43 aa, Artificial Sequence
  Quasi-synthetic sequence derived from human genome
IVTVIFPSSHSFILIMGNSKLREAFLKMLRFVKCFLRRRKPFV

SEQ ID NO: 35461 - protein, 43 aa, Artificial Sequence
  Quasi-synthetic sequence derived from human genome
LRQRQMDRHAKIKRAITFIMVVAIVFVICFLPSVVVRIRIFWL

SEQ ID NO: 35462 - protein, 43 aa, Artificial Sequence
  Quasi-synthetic sequence derived from human genome
MPTPLLPLLLRLLLSCLLLPAARLARQYLLPLLRRLARRLGSQ

SEQ ID NO: 35463 - protein, 43 aa, Artificial Sequence
  Quasi-synthetic sequence derived from human genome
YKKKLWKKTPARKKRLREFVFCNKTQSKLLDKMTTSFWKRRNW

SEQ ID NO: 35464 - protein, 43 aa, Artificial Sequence
  Quasi-synthetic sequence derived from human genome
LLVICLCYLLIVVKVRAAGVRVGCVRRRSERKVTRMVLVVVLV

SEQ ID NO: 35465 - protein, 43 aa, Artificial Sequence
  Quasi-synthetic sequence derived from human genome
FMVKIFMLLVVGITSGMWIWTSKTLQSWQQVCSRRLKKKSRRK

SEQ ID NO: 35466 - protein, 43 aa, Artificial Sequence
  Quasi-synthetic sequence derived from human genome
RVSKALMASMARRASRGPIAFWARRASRTRLAAWARRALLSLR

SEQ ID NO: 35467 - protein, 43 aa, Artificial Sequence
  Quasi-synthetic sequence derived from human genome
LKMVGPGFLSLGLMMLVCGLVWVPIIKKKQKHRQKSNFLRSLK

SEQ ID NO: 35468 - protein, 43 aa, Artificial Sequence
  Quasi-synthetic sequence derived from human genome
FFIFLKILKLLISKLKAHQMCFRDYKYRLAKSTLVLIPLLGVH

SEQ ID NO: 35469 - protein, 43 aa, Artificial Sequence
  Quasi-synthetic sequence derived from human genome
FAVRSGLLTVMVWVSSIFFFLPVFCLTVLYSLIGRKLWRRRRG

SEQ ID NO: 35470 - protein, 43 aa, Artificial Sequence
  Quasi-synthetic sequence derived from human genome
FGISVLRALRLLRIFKVTKYWASLRNLVVSLLNSMKSIISLLF

SEQ ID NO: 35471 - protein, 43 aa, Artificial Sequence
  Quasi-synthetic sequence derived from human genome
IIIQKHCKAFKIRKHYLHLRATVVSIQRRYRKLTAVRTQAVIC

SEQ ID NO: 35472 - protein, 43 aa, Artificial Sequence
  Quasi-synthetic sequence derived from human genome
RRKKRLRHRVPPRKPEPLVKLHRTALHWACLKGHSQLVNKLLV

SEQ ID NO: 35473 - protein, 43 aa, Artificial Sequence
  Quasi-synthetic sequence derived from human genome
RDKLKFWTHCVLATLIMFTIFSFFAEQLIALKRKIFPRRRIHK

SEQ ID NO: 35474 - protein, 43 aa, Artificial Sequence
  Quasi-synthetic sequence derived from human genome
WVAGCWLLLVLVLVLLVSPRGCRARRGLRGLLMAHSQRLLFRI

SEQ ID NO: 35475 - protein, 43 aa, Artificial Sequence
  Quasi-synthetic sequence derived from human genome
VHELRVKRSVTRIKKRSRSVFYRLTILILVFAVSWMPLHLFHV

SEQ ID NO: 35476 - protein, 43 aa, Artificial Sequence
  Quasi-synthetic sequence derived from human genome
FYRNKLKYLAFLRKRMNTNPSRGPYHFRAPSRIFWRTVRGMLP

SEQ ID NO: 35477 - protein, 43 aa, Artificial Sequence
  Quasi-synthetic sequence derived from human genome
LRAAKWLHFPQLALRRRLGQLSCMSRPALKLRSWPLTVLYYLL

SEQ ID NO: 35478 - protein, 43 aa, Artificial Sequence
  Quasi-synthetic sequence derived from human genome
RSVFHGAIMSVFPVVMYFWKRFCFWKATRSYLQYRGKKFKDRK

SEQ ID NO: 35479 - protein, 43 aa, Artificial Sequence
  Quasi-synthetic sequence derived from human genome
VRALHRLHQFQQLLWVLGLLVGLLLLLLGLGACYTWRRRRVCK

SEQ ID NO: 35480 - protein, 43 aa, Artificial Sequence
  Quasi-synthetic sequence derived from human genome
AVFRAFRRANARCFWNARLARAASRLAFQGWLRRGVLLVRAPP

SEQ ID NO: 35481 - protein, 43 aa, Artificial Sequence
  Quasi-synthetic sequence derived from human genome
LFFRRPKASLPRVFVLRALLMVLVFLLVVSYWLFYGVRILDAR

SEQ ID NO: 35482 - protein, 43 aa, Artificial Sequence
  Quasi-synthetic sequence derived from human genome
LRPKHWFQLCRPMNPRARKNCSQIALFQKRRFQFFCSMRCRAW

SEQ ID NO: 35483 - protein, 43 aa, Artificial Sequence
  Quasi-synthetic sequence derived from human genome
VPGAKKSAKLYIPYIILTIIILTIVGFIWLLKVNGCRKYKLNK

SEQ ID NO: 35484 - protein, 43 aa, Artificial Sequence
  Quasi-synthetic sequence derived from human genome
ALLLQGLFIVLILVGYISVKVMLKSIKTRLGRRVPAAPPALRR

SEQ ID NO: 35485 - protein, 43 aa, Artificial Sequence
  Quasi-synthetic sequence derived from human genome
KSVQLFSKKFKLWLLNALEGVPALLQISKLKEVTLFVKRLRRK

SEQ ID NO: 35486 - protein, 43 aa, Artificial Sequence
  Quasi-synthetic sequence derived from human genome
YTFPPLYYRRAHRRFVTKKALCIRVFQETQKLKKRRRALKAAA

SEQ ID NO: 35487 - protein, 43 aa, Artificial Sequence
  Quasi-synthetic sequence derived from human genome
MAQILRSHLIKATVIPNRVKMLPYFGIIRNRMMSTHKSKKKIR

SEQ ID NO: 35488 - protein, 43 aa, Artificial Sequence
  Quasi-synthetic sequence derived from human genome
FRYLQRLLLVHGRWSYFRMCKFLCYFFYKNFAFTLVHFWFGFF

SEQ ID NO: 35489 - protein, 43 aa, Artificial Sequence
  Quasi-synthetic sequence derived from human genome
IMYKVPLIRKKSLRRTLSERGLLKDFLKKHNLNPARKYFPQWK

SEQ ID NO: 35490 - protein, 43 aa, Artificial Sequence
  Quasi-synthetic sequence derived from human genome
KIQLAVSHMGVLVFQGTTKINTFNWSKVRKLSFKRKRFLIKLH

SEQ ID NO: 35491 - protein, 43 aa, Artificial Sequence
  Quasi-synthetic sequence derived from human genome
ALAVIRGGATRAAGVFYPWRFRLLCLLRRWLPRPRAWFIRQEL

SEQ ID NO: 35492 - protein, 43 aa, Artificial Sequence
  Quasi-synthetic sequence derived from human genome
RKTIGGVALWRQQICAIARVRLLKLKHERKALLALLLILMAGF

SEQ ID NO: 35493 - protein, 43 aa, Artificial Sequence
  Quasi-synthetic sequence derived from human genome
RPRRPRRRASRAFCPRPCALPGRPGLTLLCRPRCRRQPRLRLP

SEQ ID NO: 35494 - protein, 43 aa, Artificial Sequence
  Quasi-synthetic sequence derived from human genome
RASPLTSIISAVVGILLVVVLGVVFGILIKRRQQKIRKYTMRR

SEQ ID NO: 35495 - protein, 43 aa, Artificial Sequence
  Quasi-synthetic sequence derived from human genome
WDKWLKVYKSIYFLGHIFFLSLLFILPYIHKAMVPRKEKLKKM

SEQ ID NO: 35496 - protein, 43 aa, Artificial Sequence
  Quasi-synthetic sequence derived from human genome
MMFVRNDCKVFRFCKSKCHKNFKKKRNPRKVRWTKAFRKAAGK

SEQ ID NO: 35497 - protein, 43 aa, Artificial Sequence
  Quasi-synthetic sequence derived from human genome
FQQFSSLTNLPLRKLKFSPIKYGYQPRRNFWPARLATRLLKLR

SEQ ID NO: 35498 - protein, 43 aa, Artificial Sequence
  Quasi-synthetic sequence derived from human genome
SPLTSIISAVVGILLVVVLGVVFGILIKRRQQKIRKYTMRRLL

SEQ ID NO: 35499 - protein, 43 aa, Artificial Sequence
  Quasi-synthetic sequence derived from human genome
KKQRKILWRKGIHLAFSEKWNTGFGGFKKFYFHQHLCILKAKL

SEQ ID NO: 35500 - protein, 43 aa, Artificial Sequence
  Quasi-synthetic sequence derived from human genome
ILKAVKIIQGCFYTKLERTRFLNVRASAIIIQRKWRAILPAKI

SEQ ID NO: 35501 - protein, 43 aa, Artificial Sequence
  Quasi-synthetic sequence derived from human genome
KLSKRQLFFRKKLLHSSQMLRAVSLGQDRYRRRYWVLPYLAGI

SEQ ID NO: 35502 - protein, 43 aa, Artificial Sequence
  Quasi-synthetic sequence derived from human genome
YLLIVGKMRAVALRAGWQQRRRSEKKITRLVLMVVVVFVLCWM

SEQ ID NO: 35503 - protein, 43 aa, Artificial Sequence
  Quasi-synthetic sequence derived from human genome
LVMLPTWWIVSSWLVWGVILFVYLVIRALRLWRTAKLQVTLKK

SEQ ID NO: 35504 - protein, 43 aa, Artificial Sequence
  Quasi-synthetic sequence derived from human genome
RRRTRAAGSLLSRAAILLFISAFLVRVPSSVGHLVRLPRAFRL

SEQ ID NO: 35505 - protein, 43 aa, Artificial Sequence
  Quasi-synthetic sequence derived from human genome
VIRLVRVFRIFKLSRHSKGLQILGKTLQASMRELGLLIFFLFI

SEQ ID NO: 35506 - protein, 43 aa, Artificial Sequence
  Quasi-synthetic sequence derived from human genome
LGRALPTSRLDLACSLSWNVIRYSLQKLRLVRWLLKKVFQCRR

SEQ ID NO: 35507 - protein, 43 aa, Artificial Sequence
  Quasi-synthetic sequence derived from human genome
LKTLLRCRNEKKRHRAVRLIFTIMIVYFLFWAPYNIVLLLNTF

SEQ ID NO: 35508 - protein, 43 aa, Artificial Sequence
  Quasi-synthetic sequence derived from human genome
RLRHPRTRWKNWWVRGILTLAMIAFFFIIIYLGPMVLMIIVMC

SEQ ID NO: 35509 - protein, 43 aa, Artificial Sequence
  Quasi-synthetic sequence derived from human genome
MAKPFFRLQKFLRRTQFLLFFLTAAYLMTGSLLLLQRVRVALP

SEQ ID NO: 35510 - protein, 43 aa, Artificial Sequence
  Quasi-synthetic sequence derived from human genome
FFGPLLVICLCYLLIVVKVRSAGRRVWAPSCQRRRRSERRVTR

SEQ ID NO: 35511 - protein, 43 aa, Artificial Sequence
  Quasi-synthetic sequence derived from human genome
LKKRAAFTKLRRAAILRRERQQKAPRHPLADILHRGCPLLRRW

SEQ ID NO: 35512 - protein, 43 aa, Artificial Sequence
  Quasi-synthetic sequence derived from human genome
RVYLHLRQTWLAFMIILSILEVIIILLLIFLRKRILIAIALIK

SEQ ID NO: 35513 - protein, 43 aa, Artificial Sequence
  Quasi-synthetic sequence derived from human genome
LRARVSYRLLGVISLLHLVLSMGLQLYGFRQRQRARKEWRLHR

SEQ ID NO: 35514 - protein, 43 aa, Artificial Sequence
  Quasi-synthetic sequence derived from human genome
PFLRKCFAISLLVICIIISIGIFYGFVANHQVRTRIKRSRKLA

SEQ ID NO: 35515 - protein, 43 aa, Artificial Sequence
  Quasi-synthetic sequence derived from human genome
LALIQLTVIMGYLRIIRFLPLFKIIVPILIRIADVQIKKRLSL

SEQ ID NO: 35516 - protein, 43 aa, Artificial Sequence
  Quasi-synthetic sequence derived from human genome
TPPFRLIRKMFSFKVSRWMGLACFRSLAASSPSIRQKKLMHKL

SEQ ID NO: 35517 - protein, 43 aa, Artificial Sequence
  Quasi-synthetic sequence derived from human genome
ARLWGRRKCKPQMNYDKLSRALRYYYNKRILHKTKGKRFTYKF

SEQ ID NO: 35518 - protein, 43 aa, Artificial Sequence
  Quasi-synthetic sequence derived from human genome
REFDRKYKKNIKALYIVHPTMFIKTLLILFKPLISFKFGQKIF

SEQ ID NO: 35519 - protein, 43 aa, Artificial Sequence
  Quasi-synthetic sequence derived from human genome
LLWYPVPCTRLPIRMAKALGKRTAKYRWFAVLYLLVCFLLLPS

SEQ ID NO: 35520 - protein, 43 aa, Artificial Sequence
  Quasi-synthetic sequence derived from human genome
GRLAQARGAAKKAGLLMALARLCFLLGRLCSRRLKLSQARVYF

SEQ ID NO: 35521 - protein, 43 aa, Artificial Sequence
  Quasi-synthetic sequence derived from human genome
TYHTVFLLAILGGMAFILLVLLCLLLYYCRRKCLKPRQHHRKL

SEQ ID NO: 35522 - protein, 43 aa, Artificial Sequence
  Quasi-synthetic sequence derived from human genome
LRRGRPKRRRKPQPHSGSVLALPLRSRKIRKQLRSVVSRMAAL

SEQ ID NO: 35523 - protein, 43 aa, Artificial Sequence
  Quasi-synthetic sequence derived from human genome
FTPQHKMLRLRLPNLKMVRLRVSFSAVVFKAVSDICKILNIRR

SEQ ID NO: 35524 - protein, 43 aa, Artificial Sequence
  Quasi-synthetic sequence derived from human genome
KSLRPIGLLRAQSLEWFYNNVKSRFKRFGSAKVLKNLYRKHRL

SEQ ID NO: 35525 - protein, 43 aa, Artificial Sequence
  Quasi-synthetic sequence derived from human genome
LKTASFFVRLGPMALAFKVRGLLDCKHSWKRLKDIRKIFPGKK

SEQ ID NO: 35526 - protein, 43 aa, Artificial Sequence
  Quasi-synthetic sequence derived from human genome
LSSIRHMIRKNKYRPDLRMAAIRRASAILRSQKPVMVKRKRTR

SEQ ID NO: 35527 - protein, 43 aa, Artificial Sequence
  Quasi-synthetic sequence derived from human genome
RFTKITQYLIRIRKLTLKRQRKLVPLSKKVERREKRREEKALI

SEQ ID NO: 35528 - protein, 43 aa, Artificial Sequence
  Quasi-synthetic sequence derived from human genome
KLRLDKLRQSCVMVQKHMRGWLQRKKFLRERRAALIIQQYFRG

SEQ ID NO: 35529 - protein, 43 aa, Artificial Sequence
  Quasi-synthetic sequence derived from human genome
KQKKKYMPYNHQHKYFFLIGPPALLPLYFQWYIFYFVIQRKKW

SEQ ID NO: 35530 - protein, 43 aa, Artificial Sequence
  Quasi-synthetic sequence derived from human genome
LFPKSFFSSKAKVIYLMRNPRDVLVSGYFFWKNMKFIKKPKSW

SEQ ID NO: 35531 - protein, 43 aa, Artificial Sequence
  Quasi-synthetic sequence derived from human genome
IQAGVRGYLARRRIRLWHRGAMVIQATWRGYRVRRNLAHLCRA

SEQ ID NO: 35532 - protein, 43 aa, Artificial Sequence
  Quasi-synthetic sequence derived from human genome
VRKAGWLFFKPLVTVQKERKLELVARRKWKQYWVTLKGCTLLF

SEQ ID NO: 35533 - protein, 43 aa, Artificial Sequence
  Quasi-synthetic sequence derived from human genome
KKMIIWFPDMVKDVIGSYKKWCRSILRRTSLILARVFGLHLRL

SEQ ID NO: 35534 - protein, 43 aa, Artificial Sequence
  Quasi-synthetic sequence derived from human genome
IVFKHKHKDCVLYLLSKMWSTVSFPKISVPMRIYIKIKQWILR

SEQ ID NO: 35535 - protein, 43 aa, Artificial Sequence
  Quasi-synthetic sequence derived from human genome
RVQRRPLKNRTDFLVPLLSSVLTVAWICCLVTAFYWCLRKRRK

SEQ ID NO: 35536 - protein, 43 aa, Artificial Sequence
  Quasi-synthetic sequence derived from human genome
KTISGVALWRQQVCAIAKVRFLKLKKERKSLWTILLLFGISFI

SEQ ID NO: 35537 - protein, 43 aa, Artificial Sequence
  Quasi-synthetic sequence derived from human genome
VVKILRVLRVLRPLRAINRAKGLKHVVQCMFVAISTIGNIVLV

SEQ ID NO: 35538 - protein, 43 aa, Artificial Sequence
  Quasi-synthetic sequence derived from human genome
KTFLSYARTSIRASLTFNRGFKAGRNMRRKLFGVLRLKCHSLF

SEQ ID NO: 35539 - protein, 43 aa, Artificial Sequence
  Quasi-synthetic sequence derived from human genome
RRRKKKERRPRGTMQAINNERKASKVLGIVFFVFLIMWCPFFI

SEQ ID NO: 35540 - protein, 43 aa, Artificial Sequence
  Quasi-synthetic sequence derived from human genome
RAIRNFHTSPRFQAAPVPLLLMILKPVQKLFAIIVGRGIRKWW

SEQ ID NO: 35541 - protein, 43 aa, Artificial Sequence
  Quasi-synthetic sequence derived from human genome
IRAVILHFFRGLLYWKNTLALAAILVLLRVRQCLSLRPAPAMR

SEQ ID NO: 35542 - protein, 43 aa, Artificial Sequence
  Quasi-synthetic sequence derived from human genome
FRLTRWRTRYKTIRINLGLWAASFILALPVWVYSKVIKFKDGV

SEQ ID NO: 35543 - protein, 43 aa, Artificial Sequence
  Quasi-synthetic sequence derived from human genome
LKRLKEEARRKHAVAVIWAYWLGLKVRREYRKFFRANAGKKIY

SEQ ID NO: 35544 - protein, 43 aa, Artificial Sequence
  Quasi-synthetic sequence derived from human genome
RSNAPNIPKLNRFLLLFIGFVCVLLSFFMARVFMRMKLPRSLA

SEQ ID NO: 35545 - protein, 43 aa, Artificial Sequence
  Quasi-synthetic sequence derived from human genome
LRLRLAILKYLFIDDKGILFVSSRKHLPTLPTLLSRLKLFLVK

SEQ ID NO: 35546 - protein, 43 aa, Artificial Sequence
  Quasi-synthetic sequence derived from human genome
RLLGPKLRRFLKPQGHPRLLLWFKRGLALAAFLGLVLWLSLDT

SEQ ID NO: 35547 - protein, 43 aa, Artificial Sequence
  Quasi-synthetic sequence derived from human genome
RSFRRHIRQHSALTRLRLRNVFRRFLRDFQPGRLSQQMVMVKY

SEQ ID NO: 35548 - protein, 43 aa, Artificial Sequence
  Quasi-synthetic sequence derived from human genome
YRTGKRLNIRKVIPYIASQFRKDKIWLRRTKPSKRQYQICLAI

SEQ ID NO: 35549 - protein, 43 aa, Artificial Sequence
  Quasi-synthetic sequence derived from human genome
RYLRVKLTVRFRIPGLPGCILSFQLKVCFLPVMWLFILLSLAL

SEQ ID NO: 35550 - protein, 43 aa, Artificial Sequence
  Quasi-synthetic sequence derived from human genome
KRGVRTLHQRFLAQLRKYFNMRVFRQRTYRIWAFGIAAAALGY

SEQ ID NO: 35551 - protein, 43 aa, Artificial Sequence
  Quasi-synthetic sequence derived from human genome
LKAKRKVVKMMIIVVMTFAICWLPYHIYFILTAIYQQLNRWKY

SEQ ID NO: 35552 - protein, 43 aa, Artificial Sequence
  Quasi-synthetic sequence derived from human genome
WYYSLSQIKFSPVAKKLFVVTAVSAISVIFLAHHFKRKRGKKK

SEQ ID NO: 35553 - protein, 43 aa, Artificial Sequence
  Quasi-synthetic sequence derived from human genome
RLLLKWRGSIYKLLYREFIVFAVLYTAISLVYRLLLTGVQKRY

SEQ ID NO: 35554 - protein, 43 aa, Artificial Sequence
  Quasi-synthetic sequence derived from human genome
LLLLLPLLLLKLHLWPQLRWLPADLAFAVRALCCKRALRARAL

SEQ ID NO: 35555 - protein, 43 aa, Artificial Sequence
  Quasi-synthetic sequence derived from human genome
KRKKKAWKRMVTKVCFVGDGFTRKPPKYERFIRPMGLRFKKAH

SEQ ID NO: 35556 - protein, 43 aa, Artificial Sequence
  Quasi-synthetic sequence derived from human genome
IGESLDGTLKSRKRRKMSKKLPPVIIKYIIINRFRGRKNMLVK

SEQ ID NO: 35557 - protein, 43 aa, Artificial Sequence
  Quasi-synthetic sequence derived from human genome
KWKIFTNFKMNILGLLIPFTIFMFCYIKILHQLKRCQNHNKTK

SEQ ID NO: 35558 - protein, 43 aa, Artificial Sequence
  Quasi-synthetic sequence derived from human genome
QMRARRKTAKMLMVVLLVFALCYLPISVLNVLKRVFGMFRQAS

SEQ ID NO: 35559 - protein, 43 aa, Artificial Sequence
  Quasi-synthetic sequence derived from human genome
MLGVCANGLLIYRDRLRINRFAWPKILKISYKRSNFYIKIRPG

SEQ ID NO: 35560 - protein, 43 aa, Artificial Sequence
  Quasi-synthetic sequence derived from human genome
RIKYIEFKKSTVILQALVRGWLVRKRFLEQRAKIRLLHFTAAA

SEQ ID NO: 35561 - protein, 43 aa, Artificial Sequence
  Quasi-synthetic sequence derived from human genome
LLKTVSYKACLPPSLRDLIQGLSFVTRRRIRRTVRRALRRVAA

SEQ ID NO: 35562 - protein, 43 aa, Artificial Sequence
  Quasi-synthetic sequence derived from human genome
VLGVVLLLLLLFYVVRYCWLRRQAALQRRLSAMEKGKLHKPGK

SEQ ID NO: 35563 - protein, 43 aa, Artificial Sequence
  Quasi-synthetic sequence derived from human genome
LKPVQKLFAIIVGRGIRKWWQALPPNKKEVVKENIRKNKWKLF

SEQ ID NO: 35564 - protein, 43 aa, Artificial Sequence
  Quasi-synthetic sequence derived from human genome
VLPKPRMRGLLARRLRNHMAVAFVLSLGVAALYKFRVADQRKK

SEQ ID NO: 35565 - protein, 43 aa, Artificial Sequence
  Quasi-synthetic sequence derived from human genome
GLARPVLAGIVATICFLAAAILFSTLAACFVNKQRKRKLKRKK

SEQ ID NO: 35566 - protein, 43 aa, Artificial Sequence
  Quasi-synthetic sequence derived from human genome
ACHLKLKNLHKAIEDSSKAYRIMKRHLRLIHPTKLYKLMLRRF

SEQ ID NO: 35567 - protein, 43 aa, Artificial Sequence
  Quasi-synthetic sequence derived from human genome
LINWFICSLCVPRVRKLWSSRRPRTRRNLLLGTACAIYLGFLV

SEQ ID NO: 35568 - protein, 43 aa, Artificial Sequence
  Quasi-synthetic sequence derived from human genome
FLPLRLVWKEVILRKILILVLVQKDVSLTTQYFLQKARSRRHR

SEQ ID NO: 35569 - protein, 43 aa, Artificial Sequence
  Quasi-synthetic sequence derived from human genome
RPLTYRAKRTPKRAGIMIGLAWLISFILWAPAILCWQYLVGKR

SEQ ID NO: 35570 - protein, 43 aa, Artificial Sequence
  Quasi-synthetic sequence derived from human genome
RQWLAIQKLRSKIHKKVDRKASKGRKLRFHVLSKLLSFMAPID

SEQ ID NO: 35571 - protein, 43 aa, Artificial Sequence
  Quasi-synthetic sequence derived from human genome
HHRNGGPLIPKKFQLNQHRRIKLSPLMMYEKLSMIRFRYRILR

SEQ ID NO: 35572 - protein, 43 aa, Artificial Sequence
  Quasi-synthetic sequence derived from human genome
FKRAFVRILGCQCRGRGRRRRRRRRRLGGCAYTYRPWTRGGSL

SEQ ID NO: 35573 - protein, 43 aa, Artificial Sequence
  Quasi-synthetic sequence derived from human genome
RWHWQKKVINKGLFFLGSLIAISSTYLLIHYMSPRSFLRLRRP

SEQ ID NO: 35574 - protein, 43 aa, Artificial Sequence
  Quasi-synthetic sequence derived from human genome
FKERLKLFFIKNQRSSLRIRLFNFSLKLLSCLLYIIRVLLENP

SEQ ID NO: 35575 - protein, 43 aa, Artificial Sequence
  Quasi-synthetic sequence derived from human genome
GWRFLRIVCKTARRDLFGLSVLIRVRLELRRHQRAGHTIPRIF

SEQ ID NO: 35576 - protein, 43 aa, Artificial Sequence
  Quasi-synthetic sequence derived from human genome
RHGFRCQFANGIFQLWFHFKRYRYRRPGPCWRPIRHCRRDPLW

SEQ ID NO: 35577 - protein, 43 aa, Artificial Sequence
  Quasi-synthetic sequence derived from human genome
QLFYLSASINPILYNLISKKYRAAAFKLLLARKSRPRGFHRSR

SEQ ID NO: 35578 - protein, 43 aa, Artificial Sequence
  Quasi-synthetic sequence derived from human genome
RFKHLKKLLLVHGHWCYSRLARMVVYYLYKNVCYVNLLFWYQF

SEQ ID NO: 35579 - protein, 43 aa, Artificial Sequence
  Quasi-synthetic sequence derived from human genome
IPIFFFTVVVMLITYTKILQALNIRIGTRFSTGQKKKARKKKT

SEQ ID NO: 35580 - protein, 43 aa, Artificial Sequence
  Quasi-synthetic sequence derived from human genome
RLRVQQAALRAARLRHQELFRLRGIKAQVALRLAELARRQRRR

SEQ ID NO: 35581 - protein, 43 aa, Artificial Sequence
  Quasi-synthetic sequence derived from human genome
GAKILGVLRVLRLLRTLRPLRVISRAPGLKLVVETLISSLRPI

SEQ ID NO: 35582 - protein, 43 aa, Artificial Sequence
  Quasi-synthetic sequence derived from human genome
RIKTSIFSLFRAPKLRMRVFGLCFVRFAITVPFYGLILNLQHL

SEQ ID NO: 35583 - protein, 43 aa, Artificial Sequence
  Quasi-synthetic sequence derived from human genome
CLQNFLKITSTRLLCSRLCQQLRSKRKFFGTVPISRLHRRVVI

SEQ ID NO: 35584 - protein, 43 aa, Artificial Sequence
  Quasi-synthetic sequence derived from human genome
LRTLRAVRVLRPLKLVSGIPSLQIVLKSIMKAMVPLLQIGLLL

SEQ ID NO: 35585 - protein, 43 aa, Artificial Sequence
  Quasi-synthetic sequence derived from human genome
RRKRKRSKRKKEVPFFGRRMHHTCPCLPGLACLRTSFNRFICL

SEQ ID NO: 35586 - protein, 43 aa, Artificial Sequence
  Quasi-synthetic sequence derived from human genome
FWFVLKVVLIIIRLKKYEKRGELVTVLDKFLSHAKRQPRKPFI

SEQ ID NO: 35587 - protein, 43 aa, Artificial Sequence
  Quasi-synthetic sequence derived from human genome
LKKIMAILIKRFHHTRRNWKGLIAQVILPIVFVTTAMGLGTLR

SEQ ID NO: 35588 - protein, 43 aa, Artificial Sequence
  Quasi-synthetic sequence derived from human genome
TYHIKNYIMNKDLLRRVLVLMNSKHTFLALCALRFMRRIIGLK

SEQ ID NO: 35589 - protein, 43 aa, Artificial Sequence
  Quasi-synthetic sequence derived from human genome
KYLKVFYKFLNSNRPKIRHTEKKSFKCKKRVKLFCMLSHKTQH

SEQ ID NO: 35590 - protein, 43 aa, Artificial Sequence
  Quasi-synthetic sequence derived from human genome
RRLRLQQLATLIQKIYRGWRCRTHYQLMRKSQILISSWFRGNM

SEQ ID NO: 35591 - protein, 43 aa, Artificial Sequence
  Quasi-synthetic sequence derived from human genome
CIVDKIRRKNCPACRLRKCCQAGMVLGGRKFKKFNKVRVVRAL

SEQ ID NO: 35592 - protein, 43 aa, Artificial Sequence
  Quasi-synthetic sequence derived from human genome
LRKSLKIIYLNSIQELEIRNMSWPRLIRKLRCYLKEMKNLRKL

SEQ ID NO: 35593 - protein, 43 aa, Artificial Sequence
  Quasi-synthetic sequence derived from human genome
FLVLLFSQYARNVKFPLPIYKSKKGWTAYKLQLFKMFPIILAI

SEQ ID NO: 35594 - protein, 43 aa, Artificial Sequence
  Quasi-synthetic sequence derived from human genome
KKKMSKLSRSARAGVIFPVGRLMRYLKKGTFKYRISVGAPVYM

SEQ ID NO: 35595 - protein, 43 aa, Artificial Sequence
  Quasi-synthetic sequence derived from human genome
RFKKGKIVLLFSLLCWVLFNLGIGFVKPATLRCVPKIRPTTHP

SEQ ID NO: 35596 - protein, 43 aa, Artificial Sequence
  Quasi-synthetic sequence derived from human genome
LSLIIGLRKTFWFFFQRHKLKGTSFLLGGVVIVLLRWPLLGMF

SEQ ID NO: 35597 - protein, 43 aa, Artificial Sequence
  Quasi-synthetic sequence derived from human genome
RKGIVRVVFFPFFFRWWLQVTSKVIFFWLLVLYLLQVAAIVLF

SEQ ID NO: 35598 - protein, 43 aa, Artificial Sequence
  Quasi-synthetic sequence derived from human genome
LLLILRGQTRHQVRKGVAVRARPWRKNLQEVFGKRWLLGLLVP

SEQ ID NO: 35599 - protein, 43 aa, Artificial Sequence
  Quasi-synthetic sequence derived from human genome
VMRFSLAVLYQACCVALLLWLALLLSIQRRLPRERKIKYSKLL

SEQ ID NO: 35600 - protein, 43 aa, Artificial Sequence
  Quasi-synthetic sequence derived from human genome
RLRNAKIYVERAVKQKKIFTIQGCYPVIRCLLRRRGWVEKKMV

SEQ ID NO: 35601 - protein, 43 aa, Artificial Sequence
  Quasi-synthetic sequence derived from human genome
LYFLFICPFVLLLLLLISLLCLYWKARKLSTLRSNTRKEKALW

SEQ ID NO: 35602 - protein, 43 aa, Artificial Sequence
  Quasi-synthetic sequence derived from human genome
LRALLLWGRRLRPLLRAPALAAVPGGKPILCPRRTTAQLGPRR

SEQ ID NO: 35603 - protein, 43 aa, Artificial Sequence
  Quasi-synthetic sequence derived from human genome
LRKVHLFTIIQMSCLGLLWIIKVSRAAIVFPMMVLALVFVRKL

SEQ ID NO: 35604 - protein, 43 aa, Artificial Sequence
  Quasi-synthetic sequence derived from human genome
WRRKHWVVKLLTCMTIGFLFPMLSIAYLISPRSNLGLFIKKPF

SEQ ID NO: 35605 - protein, 43 aa, Artificial Sequence
  Quasi-synthetic sequence derived from human genome
RLGRRLGRRRRPRSPPEPLRVRARLRLRSPSGAFAALGALVVL

SEQ ID NO: 35606 - protein, 43 aa, Artificial Sequence
  Quasi-synthetic sequence derived from human genome
KVLKVVAKVIRALLRILCCLLKAICRVLSIPVRVLVDVATFPV

SEQ ID NO: 35607 - protein, 43 aa, Artificial Sequence
  Quasi-synthetic sequence derived from human genome
LPFFCFLLGKCFKKGLKGKGFVLLVKLACIVVASFVLCWLPFF

SEQ ID NO: 35608 - protein, 43 aa, Artificial Sequence
  Quasi-synthetic sequence derived from human genome
RRHYYLLRQFKIFSDFRMNKAFVTWKLNVKRIKTEKSRSFLYH

SEQ ID NO: 35609 - protein, 43 aa, Artificial Sequence
  Quasi-synthetic sequence derived from human genome
RRRIKSLLPKLSCGVKNRMHIRRKRIVGGKRAQLGDLPWQVAI

SEQ ID NO: 35610 - protein, 43 aa, Artificial Sequence
  Quasi-synthetic sequence derived from human genome
AKILGVLRVLRLLRTLRPLRVISRAPGLKLVVETLISSLKPIG

SEQ ID NO: 35611 - protein, 43 aa, Artificial Sequence
  Quasi-synthetic sequence derived from human genome
FLRRPGAPASWIWWRMLRQVLRRGLQSFCHRLGLCVSRHPVFF

SEQ ID NO: 35612 - protein, 43 aa, Artificial Sequence
  Quasi-synthetic sequence derived from human genome
MRRMALSMIERRKRWRTIKLLLRRGADPNLCCVPMQVLFLAVK

SEQ ID NO: 35613 - protein, 43 aa, Artificial Sequence
  Quasi-synthetic sequence derived from human genome
AKHWMLHFPRITYPLVHLANWLCGLNLFWICKTCFRCLKRLKM

SEQ ID NO: 35614 - protein, 43 aa, Artificial Sequence
  Quasi-synthetic sequence derived from human genome
RYPIWLITPQTYLIIWVITNCVSTMLLLWTFLLQRRFVKKRGK

SEQ ID NO: 35615 - protein, 43 aa, Artificial Sequence
  Quasi-synthetic sequence derived from human genome
RFIKYFVKGRQAVLSMVRKAKYRELLLSELLGRRAPVVVRLGL

SEQ ID NO: 35616 - protein, 43 aa, Artificial Sequence
  Quasi-synthetic sequence derived from human genome
KLMRIKFQKILEERDALILIQWNIRAFMAVKNWPWMRLFFKIK

SEQ ID NO: 35617 - protein, 43 aa, Artificial Sequence
  Quasi-synthetic sequence derived from human genome
VFWRRLLGLLPGRPGLAALLGRLSDRLGRNRDRQRRRSPWLLL

SEQ ID NO: 35618 - protein, 43 aa, Artificial Sequence
  Quasi-synthetic sequence derived from human genome
RTLRQRSRRPKMRPARRRGGRRQLLLRALDAVATCWEKLFALR

SEQ ID NO: 35619 - protein, 43 aa, Artificial Sequence
  Quasi-synthetic sequence derived from human genome
RKWRAILPAKIAHEHFLMIKRHRAACLIQAHYRGYKGRQVFLR

SEQ ID NO: 35620 - protein, 43 aa, Artificial Sequence
  Quasi-synthetic sequence derived from human genome
WKFFMARVRLQLKIILCFSPVGRTLRVRARKFPAIVNCTAIDW

SEQ ID NO: 35621 - protein, 43 aa, Artificial Sequence
  Quasi-synthetic sequence derived from human genome
KLDRTAFKKTVNIPVLKVRKEIVSKLMRSLKRAALQRPGIRRV

SEQ ID NO: 35622 - protein, 43 aa, Artificial Sequence
  Quasi-synthetic sequence derived from human genome
ALKAKKAVLKGVHSHKKKKIRTSPTFRRPKTLRLRRQPKYPRK

SEQ ID NO: 35623 - protein, 43 aa, Artificial Sequence
  Quasi-synthetic sequence derived from human genome
LKVKQAMMQLYVLKLLKVQTKYLGRQWRKSNMKTMSAIYQKVR

SEQ ID NO: 35624 - protein, 43 aa, Artificial Sequence
  Quasi-synthetic sequence derived from human genome
CGKYLKVFYKFLNSNRHTIRHTGKKCFKCKKCVKSFCIRLHKT

SEQ ID NO: 35625 - protein, 43 aa, Artificial Sequence
  Quasi-synthetic sequence derived from human genome
RRRCCRLCIWLLQTLVHLLQLGQVWRYLRALYLGLQSRWRGER

SEQ ID NO: 35626 - protein, 43 aa, Artificial Sequence
  Quasi-synthetic sequence derived from human genome
KRDRQRLRFGPRRALAALVRRGWRCGYLECSAKYNWHVLRLFR

SEQ ID NO: 35627 - protein, 43 aa, Artificial Sequence
  Quasi-synthetic sequence derived from human genome
TVMRLRTKMPWKTCWRYLTSGGFFLLILMIFSKLLKHSVIVAI

SEQ ID NO: 35628 - protein, 43 aa, Artificial Sequence
  Quasi-synthetic sequence derived from human genome
SPRAARPPLLLRPVKLLRRRFRLLLALAVVSVGLWTLYLELVA

SEQ ID NO: 35629 - protein, 43 aa, Artificial Sequence
  Quasi-synthetic sequence derived from human genome
LARKAIQRRKWAVRIIRKFIKGFISRNKPLCPDNEEFIVFVRK

SEQ ID NO: 35630 - protein, 43 aa, Artificial Sequence
  Quasi-synthetic sequence derived from human genome
VGRARAWIRLSLEKKLLSQHLKQLLSNQPLTKKLYKRYAFLRC

SEQ ID NO: 35631 - protein, 43 aa, Artificial Sequence
  Quasi-synthetic sequence derived from human genome
CLIQAYWKGFQTRKRLKKLPSAVIALQRSFRSKRSKMLLEINR

SEQ ID NO: 35632 - protein, 43 aa, Artificial Sequence
  Quasi-synthetic sequence derived from human genome
LLRKRRYHAALAVLKGFRNGAVYGAKIRAPHALVMTFLFRNGR

SEQ ID NO: 35633 - protein, 43 aa, Artificial Sequence
  Quasi-synthetic sequence derived from human genome
KNRSLKLQKMKYRPPKTKFFFTVIPQPIFLSPGITLTLPIVFR

SEQ ID NO: 35634 - protein, 43 aa, Artificial Sequence
  Quasi-synthetic sequence derived from human genome
IKIQSSYRRWMIRKRMREMHRAATFIQSTFRMHRLHMRYQALK

SEQ ID NO: 35635 - protein, 43 aa, Artificial Sequence
  Quasi-synthetic sequence derived from human genome
PLRYSSILTSNRVAKMGLILAIRSILLVIPFPFTLRRLKYCQK

SEQ ID NO: 35636 - protein, 43 aa, Artificial Sequence
  Quasi-synthetic sequence derived from human genome
VRMRRYRMTHSEKKRLKQCNVITRLRGLQVPVGLPFLLILLGL

SEQ ID NO: 35637 - protein, 43 aa, Artificial Sequence
  Quasi-synthetic sequence derived from human genome
PFYRNHKTFMVLNRKRTIYRFSAKHALFIFGPFNSIRSLAIRV

SEQ ID NO: 35638 - protein, 43 aa, Artificial Sequence
  Quasi-synthetic sequence derived from human genome
RRHVRAARPVPWNALLRRRARGPPAAVLACLLPDRALRTRLVR

SEQ ID NO: 35639 - protein, 43 aa, Artificial Sequence
  Quasi-synthetic sequence derived from human genome
KLLTLQPPGMLWLMERGGLGKPRGPRHRGLLRVRLGRFISRLL

SEQ ID NO: 35640 - protein, 43 aa, Artificial Sequence
  Quasi-synthetic sequence derived from human genome
ILGVCSSGLLVYKDKLRINRFPWPKVLKISYKRSSFFIKIRPG

SEQ ID NO: 35641 - protein, 43 aa, Artificial Sequence
  Quasi-synthetic sequence derived from human genome
WRKWKQLSRLQRNMILFLLAFLLFCGLLFYINLADHWKALAFR

SEQ ID NO: 35642 - protein, 43 aa, Artificial Sequence
  Quasi-synthetic sequence derived from human genome
QYVYKIGIYGWRKRCLYLFVLLLLIILVVNLALTIWILKVMWF

SEQ ID NO: 35643 - protein, 43 aa, Artificial Sequence
  Quasi-synthetic sequence derived from human genome
FTRAQVRRILQRVPGKQRFGIYRFLPFFFVLGGTMEWIMIKVR

SEQ ID NO: 35644 - protein, 43 aa, Artificial Sequence
  Quasi-synthetic sequence derived from human genome
LHRTLHNMMKKLFLQLIAEFKRLGSSVIYANFNRIILCTKKRR

SEQ ID NO: 35645 - protein, 43 aa, Artificial Sequence
  Quasi-synthetic sequence derived from human genome
VFMFCKAIRFSYPSIHPFILIWGNKKLKQTFLSVFWQMRYWVK

SEQ ID NO: 35646 - protein, 43 aa, Artificial Sequence
  Quasi-synthetic sequence derived from human genome
VLTIILLPVHLLITIYSALIFIPWYFLTNAKKKNAMAKRIKAK

SEQ ID NO: 35647 - protein, 43 aa, Artificial Sequence
  Quasi-synthetic sequence derived from human genome
PRLLPRNTFSRKAFKLKKPSKYCSWKCAALSAIAAALLLAILL

SEQ ID NO: 35648 - protein, 43 aa, Artificial Sequence
  Quasi-synthetic sequence derived from human genome
MLGVCASGLLIYRDRLRINRFAWPKVLKISYKRNNFYIKIRPG

SEQ ID NO: 35649 - protein, 43 aa, Artificial Sequence
  Quasi-synthetic sequence derived from human genome
RKRKISVCQQTWALLCKNFLKKWRMKRESLMEWLNSLLLLLCL

SEQ ID NO: 35650 - protein, 43 aa, Artificial Sequence
  Quasi-synthetic sequence derived from human genome
MKQLFLKAQKIVHKLFSLSKRCHKQPLISLPRQRTSTYWLTRI

SEQ ID NO: 35651 - protein, 43 aa, Artificial Sequence
  Quasi-synthetic sequence derived from human genome
FFSHFFYLSLFFWMLFKALLIIYGILVIFRRMMKSRMMVIGFA

SEQ ID NO: 35652 - protein, 43 aa, Artificial Sequence
  Quasi-synthetic sequence derived from human genome
LRGAPRLLSRVQPRAPCLRRLWGRGARPEVAGRRRAWAWGWRR

SEQ ID NO: 35653 - protein, 43 aa, Artificial Sequence
  Quasi-synthetic sequence derived from human genome
KCALVRHKFNRLPRVLILHLKRYSFNVALSLNNKIGQQVIIPR

SEQ ID NO: 35654 - protein, 43 aa, Artificial Sequence
  Quasi-synthetic sequence derived from human genome
KKLILKQALIVVLQWCFNHNFSVRLYALVALKKLWTVCKVLSV

SEQ ID NO: 35655 - protein, 43 aa, Artificial Sequence
  Quasi-synthetic sequence derived from human genome
YIPRKRGKNPMKAVGLAWYSLYTRTWLGYLFYRQQLRRARNRY

SEQ ID NO: 35656 - protein, 43 aa, Artificial Sequence
  Quasi-synthetic sequence derived from human genome
GLLSVLAMFFLLVLILSSVFLFRLFKRRQGRIFPEGKMWKLTF

SEQ ID NO: 35657 - protein, 43 aa, Artificial Sequence
  Quasi-synthetic sequence derived from human genome
LRCIRLLRIFKITKYWTSLSNLVASLLNSIRSIASLLLLLFLF

SEQ ID NO: 35658 - protein, 43 aa, Artificial Sequence
  Quasi-synthetic sequence derived from human genome
KKSNKVLPMRRVLRKRPSPAPRTIRIEWLKSKSTKAATKFMLK

SEQ ID NO: 35659 - protein, 43 aa, Artificial Sequence
  Quasi-synthetic sequence derived from human genome
RQHFKKRKIQDLAIRCVQKNIKKNKGVKDWPWWKLFTTVRPLI

SEQ ID NO: 35660 - protein, 43 aa, Artificial Sequence
  Quasi-synthetic sequence derived from human genome
RRFRRWLNRYSYTVLSSWPERALISLKNRSRFLVRPNTRNRAF

SEQ ID NO: 35661 - protein, 43 aa, Artificial Sequence
  Quasi-synthetic sequence derived from human genome
KWRMVLRILPHTFGFIVPLFVMLFCYGFTLRTLFKAHMGQKHR

SEQ ID NO: 35662 - protein, 43 aa, Artificial Sequence
  Quasi-synthetic sequence derived from human genome
WLRRRRARGIPPGPTPWPLVGNFGHVLLPPFLRRRSWLSSRTR

SEQ ID NO: 35663 - protein, 43 aa, Artificial Sequence
  Quasi-synthetic sequence derived from human genome
RRLQARRFRRSRRTGRLVVLIILTFAAFWLPYHVVNLAEAGRA

SEQ ID NO: 35664 - protein, 43 aa, Artificial Sequence
  Quasi-synthetic sequence derived from human genome
SIEWKTLQKKKQQKIKEKLRIRTKAAVKIQAWWRGTLVRRTLL

SEQ ID NO: 35665 - protein, 43 aa, Artificial Sequence
  Quasi-synthetic sequence derived from human genome
RRRRRGRTDGRRFLLRRAVPGHLGLARARVERAWLAAGLLKVP

SEQ ID NO: 35666 - protein, 43 aa, Artificial Sequence
  Quasi-synthetic sequence derived from human genome
CTLRGRRCHCLPFPKRGMQRWMLPLRRGARLLPLASSKNPRAR

SEQ ID NO: 35667 - protein, 43 aa, Artificial Sequence
  Quasi-synthetic sequence derived from human genome
KVSLFTAFFLATIMGVRFKRSKKIMPAGLVAGLSLMMILRLVL

SEQ ID NO: 35668 - protein, 43 aa, Artificial Sequence
  Quasi-synthetic sequence derived from human genome
YLKWRVKKVVLVLLLVTSVFLFLNIALINIHINASINGYRRNK

SEQ ID NO: 35669 - protein, 43 aa, Artificial Sequence
  Quasi-synthetic sequence derived from human genome
KWLLLLGLVALSECIMYKVPLIRKKSLRRTLSERGLLKDFLKK

SEQ ID NO: 35670 - protein, 43 aa, Artificial Sequence
  Quasi-synthetic sequence derived from human genome
LKTLLRCRNEKKRHRAVRVIFTIMIVYFLFWTPYNIVILLNTF

SEQ ID NO: 35671 - protein, 43 aa, Artificial Sequence
  Quasi-synthetic sequence derived from human genome
KNLRRRKAHFQYLLNHRLQILSPVLPVSCRDPRHLRRLRDKLL

SEQ ID NO: 35672 - protein, 43 aa, Artificial Sequence
  Quasi-synthetic sequence derived from human genome
WRRVLAQRKLLMLKKEKLEKVQNKAASLIQGYWRRYSTRQRFL

SEQ ID NO: 35673 - protein, 43 aa, Artificial Sequence
  Quasi-synthetic sequence derived from human genome
RLWGIRKNKPNMNYDKLSRALRYYYVKNIIKKVNGQKFVYKFV

SEQ ID NO: 35674 - protein, 43 aa, Artificial Sequence
  Quasi-synthetic sequence derived from human genome
QLGRKLITKYNRRELTDKLLIFLALALFLATVLYIVKKRLFPF

SEQ ID NO: 35675 - protein, 43 aa, Artificial Sequence
  Quasi-synthetic sequence derived from human genome
LLKKLGIKLQVLINLGLVYKVQQHNGIIFQFVAFIKRRQRAVP

SEQ ID NO: 35676 - protein, 43 aa, Artificial Sequence
  Quasi-synthetic sequence derived from human genome
IFLMLINVDRYAAIVHPLRLRHLRRPRVARLLCLGVWALILVF

SEQ ID NO: 35677 - protein, 43 aa, Artificial Sequence
  Quasi-synthetic sequence derived from human genome
LKIANFSNLIFLHLKRRVKSVILVMLLGPLLFLACQLFVINMK

SEQ ID NO: 35678 - protein, 43 aa, Artificial Sequence
  Quasi-synthetic sequence derived from human genome
VRHFLLRKKQEKFTSGIIKIQALWRGYSWRKKNDCTKIKAIRL

SEQ ID NO: 35679 - protein, 43 aa, Artificial Sequence
  Quasi-synthetic sequence derived from human genome
AVTRPFLAPRLRSPALARRLLLAVWLAALLLAVPAAVYRHLWR

SEQ ID NO: 35680 - protein, 43 aa, Artificial Sequence
  Quasi-synthetic sequence derived from human genome
FLKVIGKGSFGKVLLAKRKLDGKFYAVKVLQKKIVLNRKEQKH

SEQ ID NO: 35681 - protein, 43 aa, Artificial Sequence
  Quasi-synthetic sequence derived from human genome
LIPYLLGRKRRWSKCKIRVFVGGQINRMDQERKAIISLLSKFR

SEQ ID NO: 35682 - protein, 43 aa, Artificial Sequence
  Quasi-synthetic sequence derived from human genome
RLTFFFLIPLFIMIGCYLVIIHNLLHGRTSKLKPKVKEKSIRI

SEQ ID NO: 35683 - protein, 43 aa, Artificial Sequence
  Quasi-synthetic sequence derived from human genome
RKLLIQAAIVRIMKMRKVLKHQQLLGEVLTQLSSRFKPRVPVI

SEQ ID NO: 35684 - protein, 43 aa, Artificial Sequence
  Quasi-synthetic sequence derived from human genome
WQRRVATWFNQPARKIRRRKARQAKARRIAPRPASGPIRPIVR

SEQ ID NO: 35685 - protein, 43 aa, Artificial Sequence
  Quasi-synthetic sequence derived from human genome
APRRGRLARCWARCRDWRRMALVSALLLMLFCVALWPVQCALK

SEQ ID NO: 35686 - protein, 43 aa, Artificial Sequence
  Quasi-synthetic sequence derived from human genome
QSGKHNKKLKKSIKIIFIVVAAFLVSWLPFNTFKFLAIVSGLR

SEQ ID NO: 35687 - protein, 43 aa, Artificial Sequence
  Quasi-synthetic sequence derived from human genome
WKFQRYQLIMTFHDRPVLPPPMIILSHIYIIIMRLSGRCRKKR

SEQ ID NO: 35688 - protein, 43 aa, Artificial Sequence
  Quasi-synthetic sequence derived from human genome
MRSGGRGRPRLRLGERGLMEPLLPPKRRLLPRVRLLPLLLALA

SEQ ID NO: 35689 - protein, 43 aa, Artificial Sequence
  Quasi-synthetic sequence derived from human genome
RTLLLKNYLIKCRTKKSSVQEILFPLFFLFWLILISMMHPNKK

SEQ ID NO: 35690 - protein, 43 aa, Artificial Sequence
  Quasi-synthetic sequence derived from human genome
ILVWKNWLGVKRQPLWTLVLILWPVIIFIILAITRTKFPPTAK

SEQ ID NO: 35691 - protein, 43 aa, Artificial Sequence
  Quasi-synthetic sequence derived from human genome
RKFKFRKMHYDRFVIFLMPHIGCIVMALSKYLMMFQIYCKVCI

SEQ ID NO: 35692 - protein, 43 aa, Artificial Sequence
  Quasi-synthetic sequence derived from human genome
SWVKRHRSSFRNRFPLLKVLILQRNKLSDTPKGLWKLKSLQSL

SEQ ID NO: 35693 - protein, 43 aa, Artificial Sequence
  Quasi-synthetic sequence derived from human genome
HLILWTLCSVLLPVFITFWCSLQRSRRQLHRRDIFRKSKHGWR

SEQ ID NO: 35694 - protein, 43 aa, Artificial Sequence
  Quasi-synthetic sequence derived from human genome
RSLLQSLSRLQKPRAFILKSKGIKQKQIIPKNLLDSKSLKLII

SEQ ID NO: 35695 - protein, 43 aa, Artificial Sequence
  Quasi-synthetic sequence derived from human genome
GKFIRIFQLSNNIRSVVLRHCKKRQSHLRLTLKNNVFLFIDKL

SEQ ID NO: 35696 - protein, 43 aa, Artificial Sequence
  Quasi-synthetic sequence derived from human genome
VRRKALDLLNNKLQQNISWKKTIVTRFLKLVPDLLAIVQRKKK

SEQ ID NO: 35697 - protein, 43 aa, Artificial Sequence
  Quasi-synthetic sequence derived from human genome
VFLKVLTAQDKKEAALRERLKTLRRPRVRDRLPILLQRRMRVK

SEQ ID NO: 35698 - protein, 43 aa, Artificial Sequence
  Quasi-synthetic sequence derived from human genome
RLKYFFMSPCDKFRAKGRKPCKLMLQVVKILVVTVQLILFGLS

SEQ ID NO: 35699 - protein, 43 aa, Artificial Sequence
  Quasi-synthetic sequence derived from human genome
YINKKTFIVLNKGKAIFRFSATSALYILTPFNPLRKIAIKILV

SEQ ID NO: 35700 - protein, 43 aa, Artificial Sequence
  Quasi-synthetic sequence derived from human genome
RPAVHRGIRYLLYRAQRAIRLRHALRLHPQLHRAPIRTWSPHV

SEQ ID NO: 35701 - protein, 43 aa, Artificial Sequence
  Quasi-synthetic sequence derived from human genome
RAYLTLLFATSIAGPGLLIGLLYARLARAYRRSQRASFKRARR

SEQ ID NO: 35702 - protein, 43 aa, Artificial Sequence
  Quasi-synthetic sequence derived from human genome
WRGYRQRKIYLEWLQYFKANLDAIIKIQAWARMWAARRQYLRR

SEQ ID NO: 35703 - protein, 43 aa, Artificial Sequence
  Quasi-synthetic sequence derived from human genome
LWGVRKCKPQMNYDKLSRALRYYYNKRILHKTKGKRFTYKFNF

SEQ ID NO: 35704 - protein, 43 aa, Artificial Sequence
  Quasi-synthetic sequence derived from human genome
PQPVLAGVVGGVCFLGVAVLVSILAGCLLNRRRAARRRRKRLR

SEQ ID NO: 35705 - protein, 43 aa, Artificial Sequence
  Quasi-synthetic sequence derived from human genome
WFVRKLSGLLILLVLFAIGYFLQRIICPSPRRYPRGQARPGQR

SEQ ID NO: 35706 - protein, 43 aa, Artificial Sequence
  Quasi-synthetic sequence derived from human genome
IRLPILFAIGVNFLIFVRVICIVVSKLKANLMCKTDIKCRLAK

SEQ ID NO: 35707 - protein, 43 aa, Artificial Sequence
  Quasi-synthetic sequence derived from human genome
FPVPTWILVLSLSLAGALFLLAGLVAVALVVRKVKLRNLQKKR

SEQ ID NO: 35708 - protein, 43 aa, Artificial Sequence
  Quasi-synthetic sequence derived from human genome
FLRDLVETTHLFLKMLERFCRSRGNLVVQNKQKKRRKKKKKVL

SEQ ID NO: 35709 - protein, 43 aa, Artificial Sequence
  Quasi-synthetic sequence derived from human genome
IGKKRNSTLYITMLLIVPVIVAGAIIVLLLYLKRLKIIIFPPI

SEQ ID NO: 35710 - protein, 43 aa, Artificial Sequence
  Quasi-synthetic sequence derived from human genome
KSKIFFLFRLCKKLPFNMMSWLNFSIRTEIRNLSVFLALPCKF

SEQ ID NO: 35711 - protein, 43 aa, Artificial Sequence
  Quasi-synthetic sequence derived from human genome
KFKVIALTVLASVRIYYQYRRVKPVTREIVIRDPYALRPLRRL

SEQ ID NO: 35712 - protein, 43 aa, Artificial Sequence
  Quasi-synthetic sequence derived from human genome
WRQALLAGLFASLGLVALLAALVCNTLSGLALLRARWRRRSRR

SEQ ID NO: 35713 - protein, 43 aa, Artificial Sequence
  Quasi-synthetic sequence derived from human genome
TIQKHVRGWMARRHFQRLRDAAIVIQCAFRMLKARRELKALRI

SEQ ID NO: 35714 - protein, 43 aa, Artificial Sequence
  Quasi-synthetic sequence derived from human genome
RMARKAGNFYVPAEPKLAFVIRIRGINGVSPKVRKVLQLLRLR

SEQ ID NO: 35715 - protein, 43 aa, Artificial Sequence
  Quasi-synthetic sequence derived from human genome
NTFKERLKLFFIKNQRSSLRIRLFNFSLKLLTCLLYIVRVLLD

SEQ ID NO: 35716 - protein, 43 aa, Artificial Sequence
  Quasi-synthetic sequence derived from human genome
LLILKAGRRWNKYFKSRRPLFTGGLIGGLFTYVLFWTFLYGMV

SEQ ID NO: 35717 - protein, 43 aa, Artificial Sequence
  Quasi-synthetic sequence derived from human genome
HARSKNWRLSVRCGGWPLRWLMENGFLPDPPRIRYRKKKRILK

SEQ ID NO: 35718 - protein, 43 aa, Artificial Sequence
  Quasi-synthetic sequence derived from human genome
RPLTYRAKRTTKRAGVMIGLAWVISFVLWAPAILFWQYFVGKR

SEQ ID NO: 35719 - protein, 43 aa, Artificial Sequence
  Quasi-synthetic sequence derived from human genome
ARLRGFLVRQKFAEHSHFLRTWLPAVIKIQAHWRGYRQRKIYL

SEQ ID NO: 35720 - protein, 43 aa, Artificial Sequence
  Quasi-synthetic sequence derived from human genome
WGLRLPQKFLFLLFLSGLVTLCFGALFLLPHSSRLKRLFLAPR

SEQ ID NO: 35721 - protein, 43 aa, Artificial Sequence
  Quasi-synthetic sequence derived from human genome
GCLKPKFPFLSIRRSALLYIALHLKAFNPKGSEYTRKKYKKKM

SEQ ID NO: 35722 - protein, 43 aa, Artificial Sequence
  Quasi-synthetic sequence derived from human genome
IQPKRDLTRFVKWPRYIRLQRQRAILYKRLKVPPAINQFTQAL

SEQ ID NO: 35723 - protein, 43 aa, Artificial Sequence
  Quasi-synthetic sequence derived from human genome
KLSRALRYYYNKRILHKTKGKRFTYKFNFNKLVLVNYPFIDVG

SEQ ID NO: 35724 - protein, 43 aa, Artificial Sequence
  Quasi-synthetic sequence derived from human genome
LKRAASAIYRLFDYRGRLSPVPVPRAVPVKRPRVTVPLVRRVK

SEQ ID NO: 35725 - protein, 43 aa, Artificial Sequence
  Quasi-synthetic sequence derived from human genome
FFILRRKPVEQKKIFTIQGCYPVIRCLLRRRGWVEKKMVHRSG

SEQ ID NO: 35726 - protein, 43 aa, Artificial Sequence
  Quasi-synthetic sequence derived from human genome
FLPLSMLITVIIDNFNKHKIKLGGSNIFITVKQRKQYRRLKKL

SEQ ID NO: 35727 - protein, 43 aa, Artificial Sequence
  Quasi-synthetic sequence derived from human genome
TLVLGFVLPVCTICVLYTDLLRRLRAVRLRSGAKALGKARRKV

SEQ ID NO: 35728 - protein, 43 aa, Artificial Sequence
  Quasi-synthetic sequence derived from human genome
KKNPKLINALRRCFFWRFMFYGIFLYLGEVTKAVQPLLLGRII

SEQ ID NO: 35729 - protein, 43 aa, Artificial Sequence
  Quasi-synthetic sequence derived from human genome
RLASHCLAYANSCLNPLVYALASRHFRARFRRLWPCGRRRRHR

SEQ ID NO: 35730 - protein, 43 aa, Artificial Sequence
  Quasi-synthetic sequence derived from human genome
RLLQAAPAAAPRALLPQWPRRPGRRWPASPLGMKVFRRKALVL

SEQ ID NO: 35731 - protein, 43 aa, Artificial Sequence
  Quasi-synthetic sequence derived from human genome
HTFYIRSYILNKDLLRKALILMNSKHTHLILCVLRFMRRMICL

SEQ ID NO: 35732 - protein, 43 aa, Artificial Sequence
  Quasi-synthetic sequence derived from human genome
MSRPALKLRSWPLTVLYYLLPFGALRPLSRVGWRPVSRVALYK

SEQ ID NO: 35733 - protein, 43 aa, Artificial Sequence
  Quasi-synthetic sequence derived from human genome
ARGAPRGSRRPGRTPKWRLPRISARAPYRLRRLRRHTYWPPRR

SEQ ID NO: 35734 - protein, 43 aa, Artificial Sequence
  Quasi-synthetic sequence derived from human genome
RRVVQIFRIMRILRILKLARHSTGLQSLGFTLRRSYNELGLLI

SEQ ID NO: 35735 - protein, 43 aa, Artificial Sequence
  Quasi-synthetic sequence derived from human genome
LKVARALTLLRFELLPDPTRIPIPMARLVLKSKNGIHLRLRRL

SEQ ID NO: 35736 - protein, 43 aa, Artificial Sequence
  Quasi-synthetic sequence derived from human genome
LHPSVRQRCLIQQKRRRHRATRKIGIAIATFLICFAPYVMTRL

SEQ ID NO: 35737 - protein, 43 aa, Artificial Sequence
  Quasi-synthetic sequence derived from human genome
LLILLCMSLLLFQVIRLYQRRRWMIRALHLFPAPPAHWFYGHK

SEQ ID NO: 35738 - protein, 43 aa, Artificial Sequence
  Quasi-synthetic sequence derived from human genome
PRKKRRRSRLVLYPETSRKYRPRVEHRSRAQRCLLLLVAIVGF

SEQ ID NO: 35739 - protein, 43 aa, Artificial Sequence
  Quasi-synthetic sequence derived from human genome
MRRPGAPASWIWWRMLRQVLRRGLQSFCHRLGLCVSRHPVFFL

SEQ ID NO: 35740 - protein, 43 aa, Artificial Sequence
  Quasi-synthetic sequence derived from human genome
IRRSVQISVLLPAVNIRRRIKLTFPQPARPRAPRSLCLWQTWF

SEQ ID NO: 35741 - protein, 43 aa, Artificial Sequence
  Quasi-synthetic sequence derived from human genome
VRSWSLALTWALNYRTGVRLRGAILTMAFKKILKLKNIKEKSL

SEQ ID NO: 35742 - protein, 43 aa, Artificial Sequence
  Quasi-synthetic sequence derived from human genome
FWIILAVAIIVVSVGLGLILYCVCKWQLRRGKKWEIAKPLKHK

SEQ ID NO: 35743 - protein, 43 aa, Artificial Sequence
  Quasi-synthetic sequence derived from human genome
WRKTVCHNGVLGLSRLLFFLLGFLRIRVRGQRASRLQAPVLVA

SEQ ID NO: 35744 - protein, 43 aa, Artificial Sequence
  Quasi-synthetic sequence derived from human genome
RLRQKVAVKKLSRPFQSLIHARRTYRELRLLKHLKHENVIGLL

SEQ ID NO: 35745 - protein, 43 aa, Artificial Sequence
  Quasi-synthetic sequence derived from human genome
FIIIKVKSSGIRVGSSKRKKSEKKVTRMVSIVVAVFIFCWLPF

SEQ ID NO: 35746 - protein, 43 aa, Artificial Sequence
  Quasi-synthetic sequence derived from human genome
FWKKIIAYQQKLLNYFARNFYNMRMLALFVAFAINFILLFYKV

SEQ ID NO: 35747 - protein, 43 aa, Artificial Sequence
  Quasi-synthetic sequence derived from human genome
PKRRKKRYLRHDKPPYTYLAMIALVIQAAPSRRLKLAQIIRQV

SEQ ID NO: 35748 - protein, 43 aa, Artificial Sequence
  Quasi-synthetic sequence derived from human genome
RVALARVSSVKLISKAKIRTVKMTFIIVLAFIVCWTPFFFVQM

SEQ ID NO: 35749 - protein, 43 aa, Artificial Sequence
  Quasi-synthetic sequence derived from human genome
IIHRLRRRGRSGLQPRVGKSTAILLGITTLFTLLWAPRVFVML

SEQ ID NO: 35750 - protein, 43 aa, Artificial Sequence
  Quasi-synthetic sequence derived from human genome
RIIWSLRQRQMDRHAKIKRAITFIMVVAIVFVICFLPSVVVRI

SEQ ID NO: 35751 - protein, 43 aa, Artificial Sequence
  Quasi-synthetic sequence derived from human genome
RIVRALFEIALRKRWPTMTYRLLNLSKVIDKRLWGWASPLRQF

SEQ ID NO: 35752 - protein, 43 aa, Artificial Sequence
  Quasi-synthetic sequence derived from human genome
QLLSRCFRSWRHLVKRQREPAAAAVALGRWQLLRKCLQALWLR

SEQ ID NO: 35753 - protein, 43 aa, Artificial Sequence
  Quasi-synthetic sequence derived from human genome
LRFKYLLKQALATGMRRGLLARPLNSKARGATGSFKLVPKHKK

SEQ ID NO: 35754 - protein, 43 aa, Artificial Sequence
  Quasi-synthetic sequence derived from human genome
KRRQARRTAVIVQQKLRSSLLTKKQDQAARKIMRFLRRCRHRV

SEQ ID NO: 35755 - protein, 43 aa, Artificial Sequence
  Quasi-synthetic sequence derived from human genome
RPLVLTAWGLALEMAWVEPAWAAHWLMRRRRRKQRKKKAWIYC

SEQ ID NO: 35756 - protein, 43 aa, Artificial Sequence
  Quasi-synthetic sequence derived from human genome
GFIIYTFILGFLVPLTIICLCYLFIIIKVKSSGIRVGSSKRKK

SEQ ID NO: 35757 - protein, 43 aa, Artificial Sequence
  Quasi-synthetic sequence derived from human genome
FLNPFKKIKDHLLLIKKVTWTMNGLMLPTDIKRRKTKPVLSIR

SEQ ID NO: 35758 - protein, 43 aa, Artificial Sequence
  Quasi-synthetic sequence derived from human genome
RFRRSRSPMHYMYRPRSRSPRICHRFISRYRSRSRSRSPYRIR

SEQ ID NO: 35759 - protein, 43 aa, Artificial Sequence
  Quasi-synthetic sequence derived from human genome
RRQEQRATVRALWFWAFSLQAKVWATWLAFVLERRRKKARLQW

SEQ ID NO: 35760 - protein, 43 aa, Artificial Sequence
  Quasi-synthetic sequence derived from human genome
FYAYVEMKRKKRVHFHGFMLDVHKRIHRLKQSLPKRKPGFMAK

SEQ ID NO: 35761 - protein, 43 aa, Artificial Sequence
  Quasi-synthetic sequence derived from human genome
LLVFTALAILIMRLKMFLTPHMCVMASLICSRQLFGWLFRRVR

SEQ ID NO: 35762 - protein, 43 aa, Artificial Sequence
  Quasi-synthetic sequence derived from human genome
RLVRVFRIFKLSRHSKGLQILGKTLQASMRELGLLIFFLFIGV

SEQ ID NO: 35763 - protein, 43 aa, Artificial Sequence
  Quasi-synthetic sequence derived from human genome
KCLYSRITVNTAFGTKFSHISFIILFKVFLFPRITISKKTKLV

SEQ ID NO: 35764 - protein, 43 aa, Artificial Sequence
  Quasi-synthetic sequence derived from human genome
VHARWIVGKVIGTKMQKTAKVRVTRLVLDPYLLKYFNKRKTYF

SEQ ID NO: 35765 - protein, 43 aa, Artificial Sequence
  Quasi-synthetic sequence derived from human genome
PRTPMSWSRIKKILKEGPMLKNCNSFKRWKLRYFLVQGQKLYF

SEQ ID NO: 35766 - protein, 43 aa, Artificial Sequence
  Quasi-synthetic sequence derived from human genome
LIVQRWIRGFLVRKNLSPVFFHKKKQQEKIIRGYEAKWIYITK

SEQ ID NO: 35767 - protein, 43 aa, Artificial Sequence
  Quasi-synthetic sequence derived from human genome
KLVSPKWKNFKGLKLQWRDKIRLNNAIWRAWYMQYLEKRKNPV

SEQ ID NO: 35768 - protein, 43 aa, Artificial Sequence
  Quasi-synthetic sequence derived from human genome
LSFHLLFGLEIRMRRIVFAGVILFRLLGVILFRLLGVILFGRL

SEQ ID NO: 35769 - protein, 43 aa, Artificial Sequence
  Quasi-synthetic sequence derived from human genome
LKRFKVMKIKVLRSWCRQILKGLQFLHTRTPPIIHRDLKCDNI

SEQ ID NO: 35770 - protein, 43 aa, Artificial Sequence
  Quasi-synthetic sequence derived from human genome
RISITFFRLFRVMRLVKLLSRGEGIRTLLWTFIKSFQALPYVA

SEQ ID NO: 35771 - protein, 43 aa, Artificial Sequence
  Quasi-synthetic sequence derived from human genome
IRKRLRCRRKTVLVLMCILTAYVLCWAPFYGFTIVRDFFPTVF

SEQ ID NO: 35772 - protein, 43 aa, Artificial Sequence
  Quasi-synthetic sequence derived from human genome
RKEVKRIRVLVIRKLVRSVGRLKSKKGTEDALLKNQRRAQRLL

SEQ ID NO: 35773 - protein, 43 aa, Artificial Sequence
  Quasi-synthetic sequence derived from human genome
WHHHCVLWQQLQFIPFFKYCLLRKSFTCWKKNVRLQGLHRLQK

SEQ ID NO: 35774 - protein, 43 aa, Artificial Sequence
  Quasi-synthetic sequence derived from human genome
LKSSVGSRRGFFTKLPPAERRYFKRVVLAARTKRGHLVLKSFK

SEQ ID NO: 35775 - protein, 43 aa, Artificial Sequence
  Quasi-synthetic sequence derived from human genome
KVKCILKTPGKINCLRNCKTYQARKPLWFYNTSLKFFLNKPML

SEQ ID NO: 35776 - protein, 43 aa, Artificial Sequence
  Quasi-synthetic sequence derived from human genome
LIKKAVAVRKHLERNRKDKDAKFRLILIESRIHRLARYYKTKR

SEQ ID NO: 35777 - protein, 43 aa, Artificial Sequence
  Quasi-synthetic sequence derived from human genome
KMFPKVRESQLLLNVVSQLAKRNLRLLVLGRKHMLRRSSQWSR

SEQ ID NO: 35778 - protein, 43 aa, Artificial Sequence
  Quasi-synthetic sequence derived from human genome
CPKYFMKLVNLYKGAVLYLLRGRKTFLIPVLFNNYITAALKLL

SEQ ID NO: 35779 - protein, 43 aa, Artificial Sequence
  Quasi-synthetic sequence derived from human genome
LWKKLCQYHFSERQIRKRLILSDKGQLDWKKMYFKLVRCYPRK

SEQ ID NO: 35780 - protein, 43 aa, Artificial Sequence
  Quasi-synthetic sequence derived from human genome
FAGRLVVYKIVYMFLFLLCLTLFQVYYSLWRKLLKAFWWLVVA

SEQ ID NO: 35781 - protein, 43 aa, Artificial Sequence
  Quasi-synthetic sequence derived from human genome
EGRRSLRPCSVLVSLLQKPRHRCRKRKPLLAIGFYLYRMNKYH

SEQ ID NO: 35782 - protein, 43 aa, Artificial Sequence
  Quasi-synthetic sequence derived from human genome
YRGKNPLLVPLLYDFRRMTARRRVNRKMGFHVIYKTPCGLCLR

SEQ ID NO: 35783 - protein, 43 aa, Artificial Sequence
  Quasi-synthetic sequence derived from human genome
KTVRGWLQKVKYHRLKGATLTLQRYCRGHLARRLAEHLRRIRA

SEQ ID NO: 35784 - protein, 43 aa, Artificial Sequence
  Quasi-synthetic sequence derived from human genome
VLKRLGFKGVWKGLFARIIMIGTLTALQWFIYDSVKVYFRLPR

SEQ ID NO: 35785 - protein, 43 aa, Artificial Sequence
  Quasi-synthetic sequence derived from human genome
VLIYLFSKYLAFNTLFALKRMALQRDRKEKTRAWCIFIKLCGR

SEQ ID NO: 35786 - protein, 43 aa, Artificial Sequence
  Quasi-synthetic sequence derived from human genome
HALPGTFFFIIGLWWCTKSILKYICKKQKRTCYLGSKTLFYRL

SEQ ID NO: 35787 - protein, 43 aa, Artificial Sequence
  Quasi-synthetic sequence derived from human genome
RGIIRFVIGFSLPMSIVAICYGLIAAKIHKKGMIKSSRPLRVL

SEQ ID NO: 35788 - protein, 43 aa, Artificial Sequence
  Quasi-synthetic sequence derived from human genome
RICSKLKAVLQKQGIWSEIHFILTNPRSLKHLCRLKIRKCMGR

SEQ ID NO: 35789 - protein, 43 aa, Artificial Sequence
  Quasi-synthetic sequence derived from human genome
LITDYRHWQIPLGRRFRSLKMWFVFRMYGVKGLQAYIRKHVQL

SEQ ID NO: 35790 - protein, 43 aa, Artificial Sequence
  Quasi-synthetic sequence derived from human genome
GRLQQGNMRKNVRVLSRTSKFRRLRQLLRRRKKRWQGRRGGSR

SEQ ID NO: 35791 - protein, 43 aa, Artificial Sequence
  Quasi-synthetic sequence derived from human genome
MFAKTWRVHAIFKNVKMKKKIIKDQKLLVIVGGMLLIDLCILI

SEQ ID NO: 35792 - protein, 43 aa, Artificial Sequence
  Quasi-synthetic sequence derived from human genome
QIRKLIKDGLIIRKPVTVHSRARCRKNTLARRKGRHMGIGKRK

SEQ ID NO: 35793 - protein, 43 aa, Artificial Sequence
  Quasi-synthetic sequence derived from human genome
KKNRLFSKVLVTIKKVYMKERSFKGVEFGKNLGLKSSLIRKPR

SEQ ID NO: 35794 - protein, 43 aa, Artificial Sequence
  Quasi-synthetic sequence derived from human genome
RSSRQSSFIAVGILGVVLLAIFVALFFLTKKRRQRQRLAVSSR

SEQ ID NO: 35795 - protein, 43 aa, Artificial Sequence
  Quasi-synthetic sequence derived from human genome
AKKRIIKLEKEIASLRRKMKTCLQKERRATRRWIKATCLVKNL

SEQ ID NO: 35796 - protein, 43 aa, Artificial Sequence
  Quasi-synthetic sequence derived from human genome
RKVSSIGRRYPRKRCICCFLLGLLLAVTATGLAFGTWKHARRY

SEQ ID NO: 35797 - protein, 43 aa, Artificial Sequence
  Quasi-synthetic sequence derived from human genome
KEFDRKYKKNLKALYVVHPTSFIKVLWNILKPLISHKFGKKVI

SEQ ID NO: 35798 - protein, 43 aa, Artificial Sequence
  Quasi-synthetic sequence derived from human genome
MVSFGRRVLCYPLYRHFKLVMKAYRDTIKILQLGKSAVLKCLL

SEQ ID NO: 35799 - protein, 43 aa, Artificial Sequence
  Quasi-synthetic sequence derived from human genome
LVRHKDVRRIRSLQRSVQVLRAIVVMYVICWLPYHARRLMYCY

SEQ ID NO: 35800 - protein, 43 aa, Artificial Sequence
  Quasi-synthetic sequence derived from human genome
RISITFFRLFRVMRLVKLLSKGEGIRTLLWTFIKSFQALPYVA

SEQ ID NO: 35801 - protein, 43 aa, Artificial Sequence
  Quasi-synthetic sequence derived from human genome
HHTKALSSRRLFVRRGQPFTIILYFRAPVRAFLPALKKVALTA

SEQ ID NO: 35802 - protein, 43 aa, Artificial Sequence
  Quasi-synthetic sequence derived from human genome
VKFDQKKRVKLAQGLWLMNWFSVLAGIIIFSLGLFLKIELRKR

SEQ ID NO: 35803 - protein, 43 aa, Artificial Sequence
  Quasi-synthetic sequence derived from human genome
YFRMRKARQYYLKMYKAIIVIQNYYHAYKAQVNQRKNFLQVKK

SEQ ID NO: 35804 - protein, 43 aa, Artificial Sequence
  Quasi-synthetic sequence derived from human genome
NRARRKKSSARKFGLQKLWEWCLGLVQMSSLPWRVVIGRLGRI

SEQ ID NO: 35805 - protein, 43 aa, Artificial Sequence
  Quasi-synthetic sequence derived from human genome
RPLDTVQRPKGYRKLLALGTWLLALLLTLPVMLAMRLVRRGPK

SEQ ID NO: 35806 - protein, 43 aa, Artificial Sequence
  Quasi-synthetic sequence derived from human genome
LRALLVVVNALLRKRRYHAALAVLKGFRNGAVYGAKIRAPHAL

SEQ ID NO: 35807 - protein, 43 aa, Artificial Sequence
  Quasi-synthetic sequence derived from human genome
RKRYRRKLKKYGKNVGKVIIKGCRYVVIGLQGFAAAYSAPFAV

SEQ ID NO: 35808 - protein, 43 aa, Artificial Sequence
  Quasi-synthetic sequence derived from human genome
LLMVLRCLRPLRIFKLVPQMRKVVRELFSGFKEIFLVSILLLT

SEQ ID NO: 35809 - protein, 43 aa, Artificial Sequence
  Quasi-synthetic sequence derived from human genome
ALFLLLLLLGTIATIVFFCCWHRKLQKGRHPMKSVFSGRSRSR

SEQ ID NO: 35810 - protein, 43 aa, Artificial Sequence
  Quasi-synthetic sequence derived from human genome
KISTAQKYVLARRRLVKVINNRAKLLSLCSFIIETCLFILWRH

SEQ ID NO: 35811 - protein, 43 aa, Artificial Sequence
  Quasi-synthetic sequence derived from human genome
RTAKPAHIAKVKMKFRFLGKLMAKAIMDFRLVDLPLGLPFYKW

SEQ ID NO: 35812 - protein, 43 aa, Artificial Sequence
  Quasi-synthetic sequence derived from human genome
AKLILPNKQKNAAKSNLLQCYAFRALRFLFSMERNRPLFKRLF

SEQ ID NO: 35813 - protein, 43 aa, Artificial Sequence
  Quasi-synthetic sequence derived from human genome
AIAWLLYCHKTRLKKILKESRQRHLENFRIRAKHLAANWNRIR

SEQ ID NO: 35814 - protein, 43 aa, Artificial Sequence
  Quasi-synthetic sequence derived from human genome
RGVGQQAMSLAILRVIRLVRVFRIFKLSRHSKGLQILGQTLRA

SEQ ID NO: 35815 - protein, 43 aa, Artificial Sequence
  Quasi-synthetic sequence derived from human genome
KVAVKILNRQKIRSLDVVGKIRREIQNLKLFRHPHIIKLYQVI

SEQ ID NO: 35816 - protein, 43 aa, Artificial Sequence
  Quasi-synthetic sequence derived from human genome
LRCVRLLRIFKITRYWNSLSNLVASLLNSVRSIASLLLLLFLF

SEQ ID NO: 35817 - protein, 43 aa, Artificial Sequence
  Quasi-synthetic sequence derived from human genome
IAMGFRTHHTGLLSVLAMFFLLVLILSSVFLFRLFKRRQGRIF

SEQ ID NO: 35818 - protein, 43 aa, Artificial Sequence
  Quasi-synthetic sequence derived from human genome
RSSVIIIQARSKGFIQKRKFQEIKNSTIKIQAMWRRYRAKKYL

SEQ ID NO: 35819 - protein, 43 aa, Artificial Sequence
  Quasi-synthetic sequence derived from human genome
RTPLCAILKQKAPQQYRIRAKLRSYKPRRLFQSVKLHCPKCHL

SEQ ID NO: 35820 - protein, 43 aa, Artificial Sequence
  Quasi-synthetic sequence derived from human genome
QASGQKAPRPAARRKARRLLKTVLMILLAFLVCWGPLFGLLLA

SEQ ID NO: 35821 - protein, 43 aa, Artificial Sequence
  Quasi-synthetic sequence derived from human genome
MRRTRRPRFVLMNKMDDLNLHYRFLNWRRRIREIREVRAFRYQ

SEQ ID NO: 35822 - protein, 43 aa, Artificial Sequence
  Quasi-synthetic sequence derived from human genome
LVWRVLHALLCLHRTLTSWLRVRFGTWNWIWRRCCRAASAAVL

SEQ ID NO: 35823 - protein, 43 aa, Artificial Sequence
  Quasi-synthetic sequence derived from human genome
PLQLLLAKVMRFERFGRRRVIIKKGQKGNSFYFIYLGTVAITK

SEQ ID NO: 35824 - protein, 43 aa, Artificial Sequence
  Quasi-synthetic sequence derived from human genome
RLHKTGLRGRKGNLAICVIILLFILAVINLIITLVIWAVIRIG

SEQ ID NO: 35825 - protein, 43 aa, Artificial Sequence
  Quasi-synthetic sequence derived from human genome
TRWARPFYLAFVFCLALGLLQAIKLYLRRQRLLRDLRPFPAPP

SEQ ID NO: 35826 - protein, 43 aa, Artificial Sequence
  Quasi-synthetic sequence derived from human genome
ARVRKLRSAGRCGKFHQVRRVMTILFLTMVISYFGCMKAAPMK

SEQ ID NO: 35827 - protein, 43 aa, Artificial Sequence
  Quasi-synthetic sequence derived from human genome
DKGKATGRKAPLWLRAKFQRLLFKLGCYIQKNCGKFLVVGLLI

SEQ ID NO: 35828 - protein, 43 aa, Artificial Sequence
  Quasi-synthetic sequence derived from human genome
VYGLVGAGVVLMLIILVALLMLVFRSKREVKRQKYRLSQLYKW

SEQ ID NO: 35829 - protein, 43 aa, Artificial Sequence
  Quasi-synthetic sequence derived from human genome
KRLFKKAFYAHKKDFYLIHKMIQTKTVAQCVEYYYIWKKMIKF

SEQ ID NO: 35830 - protein, 43 aa, Artificial Sequence
  Quasi-synthetic sequence derived from human genome
LAVSKFLLAFLVPLAIIASSHAAVSLRLQHRGRRRPGRFVRLV

SEQ ID NO: 35831 - protein, 43 aa, Artificial Sequence
  Quasi-synthetic sequence derived from human genome
RHSAVILQAAFRGMKTRRHLKSMHSSATLIQSRFRSLLVRRRF

SEQ ID NO: 35832 - protein, 43 aa, Artificial Sequence
  Quasi-synthetic sequence derived from human genome
IFYLLKIANFSNLLFLHLKRRVRSVILVILLGTLIFLVCHLLV

SEQ ID NO: 35833 - protein, 43 aa, Artificial Sequence
  Quasi-synthetic sequence derived from human genome
VCHGVLKRPARLPCSHIFCKKCILRWLARQKTCPCCRKEVKRK

SEQ ID NO: 35834 - protein, 43 aa, Artificial Sequence
  Quasi-synthetic sequence derived from human genome
RRRRRAKITGRERKAMRVLPVVVGAFLLCWTPFFVVHITQALC

SEQ ID NO: 35835 - protein, 43 aa, Artificial Sequence
  Quasi-synthetic sequence derived from human genome
KRVLTITGICIALLVVGIMCVVAYCKTKKQRKKLHDRLRQSLR

SEQ ID NO: 35836 - protein, 43 aa, Artificial Sequence
  Quasi-synthetic sequence derived from human genome
RIARILAGSKKKICTKKPRFMSACAQLVIAFILICIQLGIIVA

SEQ ID NO: 35837 - protein, 43 aa, Artificial Sequence
  Quasi-synthetic sequence derived from human genome
HFKTTSQKVARKFWWKNVKMIVLICVIVFIIILFIVLFATGAF

SEQ ID NO: 35838 - protein, 43 aa, Artificial Sequence
  Quasi-synthetic sequence derived from human genome
KLLREGWVHANRPKRLLLVLVSAFFIFWSPFNVVLLVHLWRRV

SEQ ID NO: 35839 - protein, 43 aa, Artificial Sequence
  Quasi-synthetic sequence derived from human genome
YKFLRFRRSLLLLVKHSCVESLFLVRNFCILYYFLGYIPKAWI

SEQ ID NO: 35840 - protein, 43 aa, Artificial Sequence
  Quasi-synthetic sequence derived from human genome
KTHLTMALTVIAGLVVIFMMLGGTFLYWRGRRIQNKRAMRRYL

SEQ ID NO: 35841 - protein, 43 aa, Artificial Sequence
  Quasi-synthetic sequence derived from human genome
KRKHFRLVLRLVLRGGRELGTFHSRLIKVISKPSQKKQSLKNT

SEQ ID NO: 35842 - protein, 43 aa, Artificial Sequence
  Quasi-synthetic sequence derived from human genome
KFLRPLRVLSQFERMKVVVRALIKTTLPTLNVFLVCLMIWLIF

SEQ ID NO: 35843 - protein, 43 aa, Artificial Sequence
  Quasi-synthetic sequence derived from human genome
LTVRPPLLPYIVNIKGQRIKKSVAYKTKKPPSLMYNVRKKKGK

SEQ ID NO: 35844 - protein, 43 aa, Artificial Sequence
  Quasi-synthetic sequence derived from human genome
LLALGALLVLQLIRRRRREHGALWLPPGFTRRPRTQSAPHRRR

SEQ ID NO: 35845 - protein, 43 aa, Artificial Sequence
  Quasi-synthetic sequence derived from human genome
YFLITFLFGMVVLALVVWKIFTLSRATAVKERGKNRKKVLTLL

SEQ ID NO: 35846 - protein, 43 aa, Artificial Sequence
  Quasi-synthetic sequence derived from human genome
VTRAGRPGLGAGLRLPRLLSPPLRPRLLLLLLLLSPPLLLLLL

SEQ ID NO: 35847 - protein, 43 aa, Artificial Sequence
  Quasi-synthetic sequence derived from human genome
VTILGLLLLRWRRPALHRPIKVNLLIPVAYLVFWAFLLVFSFI

SEQ ID NO: 35848 - protein, 43 aa, Artificial Sequence
  Quasi-synthetic sequence derived from human genome
GPVFYGFKNIFITMFATFFFFKLLIKVFLALLTHFYIVKGNRK

SEQ ID NO: 35849 - protein, 43 aa, Artificial Sequence
  Quasi-synthetic sequence derived from human genome
MIGIASAGVAVYRKYICTSFYPWVNILKISFKRKKFFIHQRQK

SEQ ID NO: 35850 - protein, 43 aa, Artificial Sequence
  Quasi-synthetic sequence derived from human genome
KKNTLKKYKIACIVLLALLVIMSLGLGLGLGLRKLEKQGSCRK

SEQ ID NO: 35851 - protein, 43 aa, Artificial Sequence
  Quasi-synthetic sequence derived from human genome
KFSMKRLTAGLIAVIVVVVVALVAGMAVLVITNRRKSGKYKKV

SEQ ID NO: 35852 - protein, 43 aa, Artificial Sequence
  Quasi-synthetic sequence derived from human genome
RVAQVLRLMRIFRILKLARHSTGLRSLGATLKYSYKEVGLLLL

SEQ ID NO: 35853 - protein, 43 aa, Artificial Sequence
  Quasi-synthetic sequence derived from human genome
MPLFLKLFICFIFIRSSPTIVSNKRVSKRKFIPPAFTNVSTKF

SEQ ID NO: 35854 - protein, 43 aa, Artificial Sequence
  Quasi-synthetic sequence derived from human genome
KFLRNKAIIRHRPALVKVILISSVAFSIALICGMAISYMIYRL

SEQ ID NO: 35855 - protein, 43 aa, Artificial Sequence
  Quasi-synthetic sequence derived from human genome
YRLNKICSGLSFQRKNQFMQRLHNYWLLKRQARNGVPLIRRLH

SEQ ID NO: 35856 - protein, 43 aa, Artificial Sequence
  Quasi-synthetic sequence derived from human genome
FWVKVASCWACVLLYLGLLLAPLCWPPTQKPQPLILRRRRHRI

SEQ ID NO: 35857 - protein, 43 aa, Artificial Sequence
  Quasi-synthetic sequence derived from human genome
RIIILKIVHRRIINRFHSFLLFMGHPPYAIREVNINKFCRIIS

SEQ ID NO: 35858 - protein, 43 aa, Artificial Sequence
  Quasi-synthetic sequence derived from human genome
VLLLLLLGLLRPLRRRSCLLAPGKGPPALGASRGPRRSWAVWY

SEQ ID NO: 35859 - protein, 43 aa, Artificial Sequence
  Quasi-synthetic sequence derived from human genome
GTKILGMLRVLRLLRTLRPLRVISRAQGLKLVVETLMSSLKPI

SEQ ID NO: 35860 - protein, 43 aa, Artificial Sequence
  Quasi-synthetic sequence derived from human genome
KFFGGRAKRLGQFLTKRGVSLRKAQITCTVIFIVWGVLVHLVI

SEQ ID NO: 35861 - protein, 43 aa, Artificial Sequence
  Quasi-synthetic sequence derived from human genome
VRSRHIGWCRSCWRVFFFMIILEKKFSFPQCGSLRRMTYLLFL

SEQ ID NO: 35862 - protein, 43 aa, Artificial Sequence
  Quasi-synthetic sequence derived from human genome
LRRPRVARLLCLGVWALILVFAVPAARVHRPSRCRYRDLEVRL

SEQ ID NO: 35863 - protein, 43 aa, Artificial Sequence
  Quasi-synthetic sequence derived from human genome
KVVRKADRSRTSILIICILITGLGIISVISHLTKRRRSQRNRR

SEQ ID NO: 35864 - protein, 43 aa, Artificial Sequence
  Quasi-synthetic sequence derived from human genome
KRRCAKCGRLDFILMKKMGIKSGFTFWNLVFLLTVSCVKGFIY

SEQ ID NO: 35865 - protein, 43 aa, Artificial Sequence
  Quasi-synthetic sequence derived from human genome
RKFKSLLLHKRTAIQHAYRLLISQRRPAGISYRQFEGLMRFYK

SEQ ID NO: 35866 - protein, 43 aa, Artificial Sequence
  Quasi-synthetic sequence derived from human genome
LHILEHRVRVLSVARPGLWLYTHPLIKLLFLPRRSRCKFFSLT

SEQ ID NO: 35867 - protein, 43 aa, Artificial Sequence
  Quasi-synthetic sequence derived from human genome
KVIKTRYRIVKKTPASPLSAPPFPLSLPSWRARRLSLSRSLVL

SEQ ID NO: 35868 - protein, 43 aa, Artificial Sequence
  Quasi-synthetic sequence derived from human genome
IQVRCRAYYQGKMQREKYLTILKAVKVLQASFRGVRVRRTLRK

SEQ ID NO: 35869 - protein, 43 aa, Artificial Sequence
  Quasi-synthetic sequence derived from human genome
KFARWFSVPWKVIFVFALLAFLFFTSWYSSYGFTRRWNCILMR

SEQ ID NO: 35870 - protein, 43 aa, Artificial Sequence
  Quasi-synthetic sequence derived from human genome
KKTFIVLNKGKAIFRFSATPALYLLSPFSVVRRGAIKVLIHAL

SEQ ID NO: 35871 - protein, 43 aa, Artificial Sequence
  Quasi-synthetic sequence derived from human genome
IKALVKPKEVKPKIPKGVSRKLDRLAYIAHPKLGKRARARIAK

SEQ ID NO: 35872 - protein, 43 aa, Artificial Sequence
  Quasi-synthetic sequence derived from human genome
PRLVRMKVFHLSLSQSVVLRHHWILPFVQALKARMTSFHRFFF

SEQ ID NO: 35873 - protein, 43 aa, Artificial Sequence
  Quasi-synthetic sequence derived from human genome
RFSLSLLLFFLPLAITAFCYVGCLRALARSGLTHRRKLRAAWV

SEQ ID NO: 35874 - protein, 43 aa, Artificial Sequence
  Quasi-synthetic sequence derived from human genome
FFKSGLNPFIYSRNSAGLRRKVLWCLQYIGLGFFCCKQKTRLR

SEQ ID NO: 35875 - protein, 43 aa, Artificial Sequence
  Quasi-synthetic sequence derived from human genome
KLTIILTKWRNTARHKSKKKEDELILKHELQLKKWKNRLILKR

SEQ ID NO: 35876 - protein, 43 aa, Artificial Sequence
  Quasi-synthetic sequence derived from human genome
RLTRKRLCSFLIALYCLFSLYAAYHVFFGRRRQAPAGSPRGLR

SEQ ID NO: 35877 - protein, 43 aa, Artificial Sequence
  Quasi-synthetic sequence derived from human genome
FLILLATAVILGSAVLLFHFCIFHRRKMKAIRRSLKEYVEKKL

SEQ ID NO: 35878 - protein, 43 aa, Artificial Sequence
  Quasi-synthetic sequence derived from human genome
LIIAKMRMVALKAGWQQRKRSERKITLMVMMVVMVFVICWMPF

SEQ ID NO: 35879 - protein, 43 aa, Artificial Sequence
  Quasi-synthetic sequence derived from human genome
MRKLFIQRAKKIDKISRIGFPMAFLIFNMFYWIIYKIVRREDV

SEQ ID NO: 35880 - protein, 43 aa, Artificial Sequence
  Quasi-synthetic sequence derived from human genome
FRKMMERRESIFCIQYNIRAFMNVKHWPWMKLYFKIKPLLKSA

SEQ ID NO: 35881 - protein, 43 aa, Artificial Sequence
  Quasi-synthetic sequence derived from human genome
KKSKVHYHVAVIINYLGHCISLVALLVAFVLFLRLRSIRCLRN

SEQ ID NO: 35882 - protein, 43 aa, Artificial Sequence
  Quasi-synthetic sequence derived from human genome
VYPLALYGFMVFFLINPTKTFYYKSRFWLLKLLFRVFTAPFHK

SEQ ID NO: 35883 - protein, 43 aa, Artificial Sequence
  Quasi-synthetic sequence derived from human genome
RQARCIWFLDTLIKFRAHRVVKRKSALGPGVPHIINTKLLKHF

SEQ ID NO: 35884 - protein, 43 aa, Artificial Sequence
  Quasi-synthetic sequence derived from human genome
KNSSKVLFRKSEKYMKLFLWLLVGVGLLGLGLRHKAYERKLGK

SEQ ID NO: 35885 - protein, 43 aa, Artificial Sequence
  Quasi-synthetic sequence derived from human genome
WRLTWRVVSPLLLTIFVAYIILLFWKPLRYKAWNPKYELFPSR

SEQ ID NO: 35886 - protein, 43 aa, Artificial Sequence
  Quasi-synthetic sequence derived from human genome
VRAHRHRGLRPRRQKALRMILAVVLVFFVCWLPENVFISVHLL

SEQ ID NO: 35887 - protein, 43 aa, Artificial Sequence
  Quasi-synthetic sequence derived from human genome
KIRKALDRLRKKRHLLRRQRTRREFPVISVVGYTNCGKTTLIK

SEQ ID NO: 35888 - protein, 43 aa, Artificial Sequence
  Quasi-synthetic sequence derived from human genome
YLRPLKKFLRKLHLPRDLPQKKKLKYMKQSLVVLGDHINTFLQ

SEQ ID NO: 35889 - protein, 43 aa, Artificial Sequence
  Quasi-synthetic sequence derived from human genome
LLLKRFLLARRSRRGLFAQIVLPALFVGLALVFSLIVPPFGHY

SEQ ID NO: 35890 - protein, 43 aa, Artificial Sequence
  Quasi-synthetic sequence derived from human genome
VKITVYRRSSLYIILSTGGIFLLVTLVTVCACWKPSKRKQKKL

SEQ ID NO: 35891 - protein, 43 aa, Artificial Sequence
  Quasi-synthetic sequence derived from human genome
ISFWKKKKSMIGMSTKLWKVKKALKMTIFWRGLMPEFQFGTYS

SEQ ID NO: 35892 - protein, 43 aa, Artificial Sequence
  Quasi-synthetic sequence derived from human genome
ARMWRIRRRYCQVLNAVRIIQAYWRCRSCASRGFIKGQYRVTA

SEQ ID NO: 35893 - protein, 43 aa, Artificial Sequence
  Quasi-synthetic sequence derived from human genome
RVAKKLWLCNMIGDVTTEQYFALRRKKKKTIKMLMLVVVLFAL

SEQ ID NO: 35894 - protein, 43 aa, Artificial Sequence
  Quasi-synthetic sequence derived from human genome
KLQVLLRDIVKRKREENLKMVWRINPAHRKLQARLDQMRKFRR

SEQ ID NO: 35895 - protein, 43 aa, Artificial Sequence
  Quasi-synthetic sequence derived from human genome
RIKAKIVEPYNKIVARTAQLARLQVACDLLRRIIRILNLSKRL

SEQ ID NO: 35896 - protein, 43 aa, Artificial Sequence
  Quasi-synthetic sequence derived from human genome
LVLLLVALSALFLGRWLVVRLATKWCQRKLQAELKIGSFRFFW

SEQ ID NO: 35897 - protein, 43 aa, Artificial Sequence
  Quasi-synthetic sequence derived from human genome
RPWKRAAILNYTKGLYFQAFGGRRRCLSKSVAPLLAHGYRRFL

SEQ ID NO: 35898 - protein, 43 aa, Artificial Sequence
  Quasi-synthetic sequence derived from human genome
VYKTARALRIVRFTKILSLLRLLRLSRLIRYIHQWEEIFHMTY

SEQ ID NO: 35899 - protein, 43 aa, Artificial Sequence
  Quasi-synthetic sequence derived from human genome
LCSPITLGLLVAGVLVLLVSLGVAIHLCCRRRRARLRFMKQFY

SEQ ID NO: 35900 - protein, 43 aa, Artificial Sequence
  Quasi-synthetic sequence derived from human genome
FSGRRLPVRAWADVRRESRLLQLLGRLPLFGLGRLVTRKSWLW

SEQ ID NO: 35901 - protein, 43 aa, Artificial Sequence
  Quasi-synthetic sequence derived from human genome
RLRRLLWIGFTLTAVALILWQCALLVFSFYTVSVSIKVHFRKL

SEQ ID NO: 35902 - protein, 43 aa, Artificial Sequence
  Quasi-synthetic sequence derived from human genome
TLIQKIYRGWKCRTHFLLMKKSQIVIAAWYRRYAQQKRYQQTK

SEQ ID NO: 35903 - protein, 43 aa, Artificial Sequence
  Quasi-synthetic sequence derived from human genome
KTFVVLNRGKTLFRFSATPALYILSPFNLIRRIAIKILIHSVF

SEQ ID NO: 35904 - protein, 43 aa, Artificial Sequence
  Quasi-synthetic sequence derived from human genome
AGKLFIAPLIMVLGLALGAIAVVIGLFVFPIYCLCKKQRKRSR

SEQ ID NO: 35905 - protein, 43 aa, Artificial Sequence
  Quasi-synthetic sequence derived from human genome
MLLRLYLVPRAVLLRSGVLLNASYRSIGALNQVRFRHWFVAKL

SEQ ID NO: 35906 - protein, 43 aa, Artificial Sequence
  Quasi-synthetic sequence derived from human genome
PLDYILITIIIMYFIFTSMAGIRNIGIWFFWIRLYKIRRGRTR

SEQ ID NO: 35907 - protein, 43 aa, Artificial Sequence
  Quasi-synthetic sequence derived from human genome
PLQRRERRYLQRRREKLMLARRGITLQKMEMPKQTRHRKLKVL

SEQ ID NO: 35908 - protein, 43 aa, Artificial Sequence
  Quasi-synthetic sequence derived from human genome
LNLKKTAIKIQSVYRGIRVRRHIQHMHRAATFIKAMFKMHQSR

SEQ ID NO: 35909 - protein, 43 aa, Artificial Sequence
  Quasi-synthetic sequence derived from human genome
MIHLPIYRHLRRFILSVIVFGSIVLLMLWLPIRIIKSVLPNFL

SEQ ID NO: 35910 - protein, 43 aa, Artificial Sequence
  Quasi-synthetic sequence derived from human genome
LKKGVFNKSRCTICSKLAEVWIFIPKLLFRLTVIILTFKCYYV

SEQ ID NO: 35911 - protein, 43 aa, Artificial Sequence
  Quasi-synthetic sequence derived from human genome
VARKFASIARNQVRKKRQMAARERKVTRTIFAILLAFILTWTP

SEQ ID NO: 35912 - protein, 43 aa, Artificial Sequence
  Quasi-synthetic sequence derived from human genome
KVKKAKAKSRIKMKKARKILAEKRAAAPVVSVPCIPPHRLSKI

SEQ ID NO: 35913 - protein, 43 aa, Artificial Sequence
  Quasi-synthetic sequence derived from human genome
IKNQTILKKGKRENIVNIRKQREKAAILIQAVWKGFILRKKLT

SEQ ID NO: 35914 - protein, 43 aa, Artificial Sequence
  Quasi-synthetic sequence derived from human genome
IRSLRQGLRVEKRLKTKAVRMIAIVLAIFLVCFVPYHVNRSVY

SEQ ID NO: 35915 - protein, 43 aa, Artificial Sequence
  Quasi-synthetic sequence derived from human genome
ALSRKASAVNMEKFKKFAARKKWKQSVRLISLCQRLSRSFLSR

SEQ ID NO: 35916 - protein, 43 aa, Artificial Sequence
  Quasi-synthetic sequence derived from human genome
GKIMVRRCLVTLRPFRLFVLGIGFFTLCFLMTSLGGQFSARRL

SEQ ID NO: 35917 - protein, 43 aa, Artificial Sequence
  Quasi-synthetic sequence derived from human genome
CLPGFPVSWRTRMRAFHLSLPGGAQLLTYLVKVLKRRTWRRNV

SEQ ID NO: 35918 - protein, 43 aa, Artificial Sequence
  Quasi-synthetic sequence derived from human genome
RRWKKKQLRRPSLLLLGCCSFGIMAPSLWKGLVGIGLFALAHA

SEQ ID NO: 35919 - protein, 43 aa, Artificial Sequence
  Quasi-synthetic sequence derived from human genome
APLRFYPASPRRLHRASTPGPAWGWLLRRRRWAALLVLGLLVA

SEQ ID NO: 35920 - protein, 43 aa, Artificial Sequence
  Quasi-synthetic sequence derived from human genome
RLLRLIILIRIFHLLHQKRQLEKLMRRLVSENKRRYTRDGFDL

SEQ ID NO: 35921 - protein, 43 aa, Artificial Sequence
  Quasi-synthetic sequence derived from human genome
VFRHIYLGLTVILGTVSILLSIAVLFILKKNYVSKHRSFITKR

SEQ ID NO: 35922 - protein, 43 aa, Artificial Sequence
  Quasi-synthetic sequence derived from human genome
EYLTYLLLWVKQRKDLLHLCCKKLKILGMPFRNIRSILKMVNL

SEQ ID NO: 35923 - protein, 43 aa, Artificial Sequence
  Quasi-synthetic sequence derived from human genome
ALRRFQGLLLDRRGRLHGQVLRLREVARRLERLRRRSLVANVA

SEQ ID NO: 35924 - protein, 43 aa, Artificial Sequence
  Quasi-synthetic sequence derived from human genome
RFQTPGRFSWFCKRRRAFWHTPRLPTLPKRVPRAGEARNLRVL

SEQ ID NO: 35925 - protein, 43 aa, Artificial Sequence
  Quasi-synthetic sequence derived from human genome
ITKRRRKSCQACRFMKCLKVGMLKEGVRLDRVRGGRQKYKRRL

SEQ ID NO: 35926 - protein, 43 aa, Artificial Sequence
  Quasi-synthetic sequence derived from human genome
KNLKSIELAFFPSCLSSKCIAMKQGVIKSLKIKYRHCLIKKFL

SEQ ID NO: 35927 - protein, 43 aa, Artificial Sequence
  Quasi-synthetic sequence derived from human genome
RKRRAAIPVPKLSCKNLCHRHQLFINFRDLGWHKWIIAPKGFM

SEQ ID NO: 35928 - protein, 43 aa, Artificial Sequence
  Quasi-synthetic sequence derived from human genome
MKPPISRAKMILITKAAIKAIKLYKHVVQIVEKFIKKCKPEYK

SEQ ID NO: 35929 - protein, 43 aa, Artificial Sequence
  Quasi-synthetic sequence derived from human genome
FCAGVLLTLLLIAFIFLIIKSYRKYRRERLPISPGPLLRWVPL

SEQ ID NO: 35930 - protein, 43 aa, Artificial Sequence
  Quasi-synthetic sequence derived from human genome
KGWIRCNTTIRKSGFGGITMLFTGYFVLCCSWSFRRLKLQRWR

SEQ ID NO: 35931 - protein, 43 aa, Artificial Sequence
  Quasi-synthetic sequence derived from human genome
LRKILLRKFCQMRKRRLREQAPLLPTPTVIDPSRFCAQPFRWF

SEQ ID NO: 35932 - protein, 43 aa, Artificial Sequence
  Quasi-synthetic sequence derived from human genome
KKTFIVLNKGKTIFRFNATPALYMLSPFSPLRRISIKILVHSL

SEQ ID NO: 35933 - protein, 43 aa, Artificial Sequence
  Quasi-synthetic sequence derived from human genome
RYRVLVHPMASRRQQRRRQARVTCVLIWVVGGLLSIPTFLLRS

SEQ ID NO: 35934 - protein, 43 aa, Artificial Sequence
  Quasi-synthetic sequence derived from human genome
RLAAIVAKQVLLGRKVVVVRCEGINISGNFYRNKLKYLAFLRK

SEQ ID NO: 35935 - protein, 43 aa, Artificial Sequence
  Quasi-synthetic sequence derived from human genome
MAARGRRAWLSVLLGLVLGFVLASRLVLPRASELKRAGPRRRA

SEQ ID NO: 35936 - protein, 43 aa, Artificial Sequence
  Quasi-synthetic sequence derived from human genome
LLKIKKTFCLCKRLTELKDNHCEQLRVKIRKLKNKASVLQKRL

SEQ ID NO: 35937 - protein, 43 aa, Artificial Sequence
  Quasi-synthetic sequence derived from human genome
VKAKTKRRLVLGLREVLKHLKLKKLKCVIISPNCEKIQSKGGL

SEQ ID NO: 35938 - protein, 43 aa, Artificial Sequence
  Quasi-synthetic sequence derived from human genome
VLVFDAFVIVICLASLILCTRSIVLALRLRKRFLNFFLEKYKR

SEQ ID NO: 35939 - protein, 43 aa, Artificial Sequence
  Quasi-synthetic sequence derived from human genome
LRASVFLVRRAIKDIVTSVFQASLKLLKMIITQYIPKHKLSKL

SEQ ID NO: 35940 - protein, 43 aa, Artificial Sequence
  Quasi-synthetic sequence derived from human genome
FKNLFYRTYMLFKNASGKRRFLLCLLLFTVITYFFVVIGIAPI

SEQ ID NO: 35941 - protein, 43 aa, Artificial Sequence
  Quasi-synthetic sequence derived from human genome
CQKGFKIQSKLLKHKQIHTRNKAFRALLLKKRRTESRPLPNKL

SEQ ID NO: 35942 - protein, 43 aa, Artificial Sequence
  Quasi-synthetic sequence derived from human genome
MAFLIMVVVYLRIYVYVKRKTNVLSPHTSGSISRRRTPMKLMK

SEQ ID NO: 35943 - protein, 43 aa, Artificial Sequence
  Quasi-synthetic sequence derived from human genome
KVFHKFLNANRHKTRHTGKKPFKCKKCGKSFCMLLHLSQHKRI

SEQ ID NO: 35944 - protein, 43 aa, Artificial Sequence
  Quasi-synthetic sequence derived from human genome
KRIKNAAANVLRETWLIYKHTKLLKKIDHAKVRKHQRKFLQAI

SEQ ID NO: 35945 - protein, 43 aa, Artificial Sequence
  Quasi-synthetic sequence derived from human genome
TVTLIILAVVGGVIGLLILILLIKKLIIFILKKTREKKKECLV

SEQ ID NO: 35946 - protein, 43 aa, Artificial Sequence
  Quasi-synthetic sequence derived from human genome
VILMLARRKERLPLYLRLLQRMEHSKKYPGFLLNNFHNLLRFW

SEQ ID NO: 35947 - protein, 43 aa, Artificial Sequence
  Quasi-synthetic sequence derived from human genome
RIFVQGQRKLAKASRKLIKKRESLSKEPAKLNKILKALQKLTR

SEQ ID NO: 35948 - protein, 43 aa, Artificial Sequence
  Quasi-synthetic sequence derived from human genome
FALLLPVYALGYLGLSFSWVLLALALLAWCRRSRGLKALRLCR

SEQ ID NO: 35949 - protein, 43 aa, Artificial Sequence
  Quasi-synthetic sequence derived from human genome
LCLLVVRFDPASPSSLHFLYKLAQLFRWIRKAAFSRLYQLRIR

SEQ ID NO: 35950 - protein, 43 aa, Artificial Sequence
  Quasi-synthetic sequence derived from human genome
FLVKRGHIVHNWKARWFILRQNTLVYYKLEGGRRVTPPKGRIL

SEQ ID NO: 35951 - protein, 43 aa, Artificial Sequence
  Quasi-synthetic sequence derived from human genome
LKTLTKPVTLSRSKINKTKVLKMIFVHLIIFCFCFVPYNINLI

SEQ ID NO: 35952 - protein, 43 aa, Artificial Sequence
  Quasi-synthetic sequence derived from human genome
FRKYKGRRLKEQQEVAAAVIQRCYRKYKQLTWIALKFALYKKM

SEQ ID NO: 35953 - protein, 43 aa, Artificial Sequence
  Quasi-synthetic sequence derived from human genome
RFRFRAFHFLNRFPSVYLRCKMVVCRAYDPSSRCYRGCVLRSK

SEQ ID NO: 35954 - protein, 43 aa, Artificial Sequence
  Quasi-synthetic sequence derived from human genome
LKHYYHGFRLLWIDTKIAARMLWRILNGHSLTRRERRQFLRIC

SEQ ID NO: 35955 - protein, 43 aa, Artificial Sequence
  Quasi-synthetic sequence derived from human genome
IIAGATIGASILLIFFFIALVFFLYRRRKGSRKDVTLRKLDIK

SEQ ID NO: 35956 - protein, 43 aa, Artificial Sequence
  Quasi-synthetic sequence derived from human genome
TRGVPPLLKSFLQERLGIHLIRRKIVKPKHHVLMSRKESWKVK

SEQ ID NO: 35957 - protein, 43 aa, Artificial Sequence
  Quasi-synthetic sequence derived from human genome
LRCVRLLRIFKVTRHWASLSNLVASLLNSMKSIASLLLLLFLF

SEQ ID NO: 35958 - protein, 43 aa, Artificial Sequence
  Quasi-synthetic sequence derived from human genome
KKKTFKGLIRIFRKGVIAVLAANRLKILGQSCASLFTWMESFK

SEQ ID NO: 35959 - protein, 43 aa, Artificial Sequence
  Quasi-synthetic sequence derived from human genome
PGTILIILTGRHRGKRVVFLKQLASGLLLVTGPLVLNRVPLRR

SEQ ID NO: 35960 - protein, 43 aa, Artificial Sequence
  Quasi-synthetic sequence derived from human genome
VRKAGALAVKNFLVHKKNKKVESATRRKWKHYWVSLKGCTLFF

SEQ ID NO: 35961 - protein, 43 aa, Artificial Sequence
  Quasi-synthetic sequence derived from human genome
VLQKRSWPFLRSFRVLRVFKLAKSWPTLNTLIKIIGNSVGALG

SEQ ID NO: 35962 - protein, 43 aa, Artificial Sequence
  Quasi-synthetic sequence derived from human genome
VRVLLRFQRKLSVLLLLLGRRRVDFRLVNELLVYGIHVTMLLV

SEQ ID NO: 35963 - protein, 43 aa, Artificial Sequence
  Quasi-synthetic sequence derived from human genome
RGSRGRKNSRTMLLPLLRRFPEQVRVSLFHTPHLRGLLRLLIP

SEQ ID NO: 35964 - protein, 43 aa, Artificial Sequence
  Quasi-synthetic sequence derived from human genome
LFRKPQRSFFGKLLREFRLVAADRRSWKILLFGVINLICTGFL

SEQ ID NO: 35965 - protein, 43 aa, Artificial Sequence
  Quasi-synthetic sequence derived from human genome
LKKFVAVLAKYFPGRPLVQNFLHSVNEWLKRQKRNKIPYSFFK

SEQ ID NO: 35966 - protein, 43 aa, Artificial Sequence
  Quasi-synthetic sequence derived from human genome
RRRRRRPGGRVPKDRPSLTVTPKRWKLRARPSLTVTPRRLGLR

SEQ ID NO: 35967 - protein, 43 aa, Artificial Sequence
  Quasi-synthetic sequence derived from human genome
IIFVKLHAPWEVLGRYAEQMNVRMPFRRKIYYLPRRYKFMSRI

SEQ ID NO: 35968 - protein, 43 aa, Artificial Sequence
  Quasi-synthetic sequence derived from human genome
RCCVRALSIQRLWYFWFLLMMGVLFCCGAGFFIRRRMYPPPLI

SEQ ID NO: 35969 - protein, 43 aa, Artificial Sequence
  Quasi-synthetic sequence derived from human genome
KRRRFSSKPVVLTEAQKQLMICHLPQVLRLHLKRFRWSGRNNR

SEQ ID NO: 35970 - protein, 43 aa, Artificial Sequence
  Quasi-synthetic sequence derived from human genome
VKIRSRKLGIFRRCWLVFKKASSKGPRRLEKFPDEKAAYFRNF

SEQ ID NO: 35971 - protein, 43 aa, Artificial Sequence
  Quasi-synthetic sequence derived from human genome
FLWFRSKQEALKQGWLHKKGGGSSTLSRRNWKKRWFVLRQSKL

SEQ ID NO: 35972 - protein, 43 aa, Artificial Sequence
  Quasi-synthetic sequence derived from human genome
LKSFQKIQVRLVRELEKKFSGKHVVFIAQRRILPKPTRKSRTK

SEQ ID NO: 35973 - protein, 43 aa, Artificial Sequence
  Quasi-synthetic sequence derived from human genome
SNLGIFIYQLCNNRKSFRLRRRDLLLGFNKRAIDKCWKIRHFP

SEQ ID NO: 35974 - protein, 43 aa, Artificial Sequence
  Quasi-synthetic sequence derived from human genome
HKPRVTNIFPKQKYLSKKTTKRKRGYIKNKLVFKKGKKISKKT

SEQ ID NO: 35975 - protein, 43 aa, Artificial Sequence
  Quasi-synthetic sequence derived from human genome
KRFNVAITRPKALLIVLGNPHVLVRLWRGGGRPLLPSGARIHR

SEQ ID NO: 35976 - protein, 43 aa, Artificial Sequence
  Quasi-synthetic sequence derived from human genome
RGVPPLLKSFLQERLGIHLIRRKIVKPKHHVLMSRKESWKVKS

SEQ ID NO: 35977 - protein, 43 aa, Artificial Sequence
  Quasi-synthetic sequence derived from human genome
LRRIHLFTLVQILCLAVLWILKSTVAAIIFPVMILGLIIVRRL

SEQ ID NO: 35978 - protein, 43 aa, Artificial Sequence
  Quasi-synthetic sequence derived from human genome
PGRRRRRPLQRGKPPYSYIALIAMALAHAPGRRLTLAAIYRFI

SEQ ID NO: 35979 - protein, 43 aa, Artificial Sequence
  Quasi-synthetic sequence derived from human genome
EYLTCLLLWVKQRRDLLHLCCKKLKILGMPFRNIRSILKMVNL

SEQ ID NO: 35980 - protein, 43 aa, Artificial Sequence
  Quasi-synthetic sequence derived from human genome
PVGIIAGATIGASILLIFFFIALVFFLYRRRKGSRKDVTLRKL

SEQ ID NO: 35981 - protein, 43 aa, Artificial Sequence
  Quasi-synthetic sequence derived from human genome
KTVAQYSGVPWWIILVAILAGILMLALLVFILWKCGFFKRNKK

SEQ ID NO: 35982 - protein, 43 aa, Artificial Sequence
  Quasi-synthetic sequence derived from human genome
RSLLVLRLCAWPALLARHEQLLYVSRKLLGQRLFNKLMKMTFY

SEQ ID NO: 35983 - protein, 43 aa, Artificial Sequence
  Quasi-synthetic sequence derived from human genome
KSFAFVGPSRYLLFHLVKYIFAVAHRLFLPFPLPLFAYRWVAR

SEQ ID NO: 35984 - protein, 43 aa, Artificial Sequence
  Quasi-synthetic sequence derived from human genome
KKKTTFFKRGKKLKCYLMPFGTGTSKCPGRFFALMEIKQLLVI

SEQ ID NO: 35985 - protein, 43 aa, Artificial Sequence
  Quasi-synthetic sequence derived from human genome
KRCKKLEAVYKEFELQKVCYLPLNTFLLKPIQRLLHYRLLLRR

SEQ ID NO: 35986 - protein, 43 aa, Artificial Sequence
  Quasi-synthetic sequence derived from human genome
MHILHISVMGGLIALLLLLLVFTVALYAQRRWQKRRRIPQKSA

SEQ ID NO: 35987 - protein, 43 aa, Artificial Sequence
  Quasi-synthetic sequence derived from human genome
FLGIEPYCVKHWWVRLLYRPYCKKNPQHLYSFIAKILWRSAKK

SEQ ID NO: 35988 - protein, 43 aa, Artificial Sequence
  Quasi-synthetic sequence derived from human genome
KIHKKGMIKSSRPLRVLTAVVASFFICWFPFQLVALLGTVWLK

SEQ ID NO: 35989 - protein, 43 aa, Artificial Sequence
  Quasi-synthetic sequence derived from human genome
HKKRWSVLAAAGLRGLVRLLHVRAGFCCGVIRAHKKAIATLCF

SEQ ID NO: 35990 - protein, 43 aa, Artificial Sequence
  Quasi-synthetic sequence derived from human genome
RVLPPVVWSPPSRKKPVLSARNSRMFGYLSPVRIPRLRGKFNL

SEQ ID NO: 35991 - protein, 43 aa, Artificial Sequence
  Quasi-synthetic sequence derived from human genome
QKLLRHLVPAAALRRKRKALWAHLFSSLRGYLKSLPRVQVESF

SEQ ID NO: 35992 - protein, 43 aa, Artificial Sequence
  Quasi-synthetic sequence derived from human genome
FIYLLRRQIRTVIQYQTVRYDILPLSPVSRNRLAQVKRKILVL

SEQ ID NO: 35993 - protein, 43 aa, Artificial Sequence
  Quasi-synthetic sequence derived from human genome
KCLRKRIWEKIALRKKELFKVRPPWVSGTCCSSVLKPRCQPRL

SEQ ID NO: 35994 - protein, 43 aa, Artificial Sequence
  Quasi-synthetic sequence derived from human genome
KALLRLVSAVNRRRMKLLLGIALLAYVASVWGNFVNMSFLLNR

SEQ ID NO: 35995 - protein, 43 aa, Artificial Sequence
  Quasi-synthetic sequence derived from human genome
KRFLLLFTFLKKNRKKKLMVFFSSCMSVKYHYELLNYIDLPVL

SEQ ID NO: 35996 - protein, 43 aa, Artificial Sequence
  Quasi-synthetic sequence derived from human genome
RRRIPRTPALCTPLALPAPTTRRRQSPWTRFQWRRRAWAAPLW

SEQ ID NO: 35997 - protein, 43 aa, Artificial Sequence
  Quasi-synthetic sequence derived from human genome
FKQGAPKPRLNQLYERALKLLPCSYKLWYRYLKARRAQVKHRC

SEQ ID NO: 35998 - protein, 43 aa, Artificial Sequence
  Quasi-synthetic sequence derived from human genome
LKKIFLAAKKKKASVHLPRIGHATKGFNWYGTERLIRKHLAAR

SEQ ID NO: 35999 - protein, 43 aa, Artificial Sequence
  Quasi-synthetic sequence derived from human genome
KKYYEIVMLCGLLKMWEDLRLRVHGPFFPRILRRRKGKREFGK

SEQ ID NO: 36000 - protein, 43 aa, Artificial Sequence
  Quasi-synthetic sequence derived from human genome
ITKRRRKSCQACRFMKCLKVGMLKEGVRLDRVRGGRQKYKRRI

SEQ ID NO: 36001 - protein, 44 aa, Artificial Sequence
  Quasi-synthetic sequence derived from human genome
LAKGLLIFLLLVILAMGLWVIRVQKRHKMPRMKKLMRNRMKLRK

SEQ ID NO: 36002 - protein, 44 aa, Artificial Sequence
  Quasi-synthetic sequence derived from human genome
RARLIPIIVLLLQKAWRGTLARWRCRRLRAIYTIMRWFRRHKVR

SEQ ID NO: 36003 - protein, 44 aa, Artificial Sequence
  Quasi-synthetic sequence derived from human genome
VKIKVRFSFFLQIYLIMIFLGLYINFRHLYKQRRRRYGQKKKKI

SEQ ID NO: 36004 - protein, 44 aa, Artificial Sequence
  Quasi-synthetic sequence derived from human genome
KKKKKRYLRASSNRNFLLTMRPFLKRAILVLSYVLVILYFRLWI

SEQ ID NO: 36005 - protein, 44 aa, Artificial Sequence
  Quasi-synthetic sequence derived from human genome
IFRGKKARRHLKMMHIAATLIQRRFRTLMMRRRFLSLKKTAILI

SEQ ID NO: 36006 - protein, 44 aa, Artificial Sequence
  Quasi-synthetic sequence derived from human genome
KTAFRIYAVSTLLLFLLFFLFRLLLRFLRLCRSFYITCRRLRCF

SEQ ID NO: 36007 - protein, 44 aa, Artificial Sequence
  Quasi-synthetic sequence derived from human genome
RPHRIAGVKRFLKHAGKWSLRWFLSPRWILQFRRWARKWSRFTR

SEQ ID NO: 36008 - protein, 44 aa, Artificial Sequence
  Quasi-synthetic sequence derived from human genome
IRIFKRKKRIKRRALLFLSYILTHFIFLALLLILIVLLRHTDCF

SEQ ID NO: 36009 - protein, 44 aa, Artificial Sequence
  Quasi-synthetic sequence derived from human genome
RGSCRSTWLRVRKARPQLILSRRPRRRLGSLRWCGRRRLRWRLL

SEQ ID NO: 36010 - protein, 44 aa, Artificial Sequence
  Quasi-synthetic sequence derived from human genome
RLRRVIAAFYFPKREKKRILFLYNDLLKKRAAFTKLRRAAILRR

SEQ ID NO: 36011 - protein, 44 aa, Artificial Sequence
  Quasi-synthetic sequence derived from human genome
MVIRAHVLGFLARKQYRKVLYCVVIIQKNYRAFLLRRRFLHLKK

SEQ ID NO: 36012 - protein, 44 aa, Artificial Sequence
  Quasi-synthetic sequence derived from human genome
IFHFLYGKNRSRIPLLRKRWFQLGRSMNPRARKKRSRIPLLRKR

SEQ ID NO: 36013 - protein, 44 aa, Artificial Sequence
  Quasi-synthetic sequence derived from human genome
MLIRIVLFLQKVWRGTLARMRYKRTKAALTIIRYYRRYKVKSYI

SEQ ID NO: 36014 - protein, 44 aa, Artificial Sequence
  Quasi-synthetic sequence derived from human genome
LRGFFIKRRFRSLRHKIILLQSRARGYLARQRYQQMRRSLVKFR

SEQ ID NO: 36015 - protein, 44 aa, Artificial Sequence
  Quasi-synthetic sequence derived from human genome
GPPPKRKKKKKFCYLCILLLIVLFILLCCLYRLCKKSKPIKKQQ

SEQ ID NO: 36016 - protein, 44 aa, Artificial Sequence
  Quasi-synthetic sequence derived from human genome
RGKLLVHSLNLLAKQGLRLLRGLRRRNVQKKVALAKKLLAKLRF

SEQ ID NO: 36017 - protein, 44 aa, Artificial Sequence
  Quasi-synthetic sequence derived from human genome
RFRSLLVRRRFISLKKATIFVQRKYRATICAKHKLYQFLHLRKA

SEQ ID NO: 36018 - protein, 44 aa, Artificial Sequence
  Quasi-synthetic sequence derived from human genome
RWTHLLRLLRLIILLRIFHLFHQKRQLEKLIRRRVSENKRRYTR

SEQ ID NO: 36019 - protein, 44 aa, Artificial Sequence
  Quasi-synthetic sequence derived from human genome
KRALGRRKGVWLRLRKILFCVLGLYIAIPFLIKLCPGIQAKLIF

SEQ ID NO: 36020 - protein, 44 aa, Artificial Sequence
  Quasi-synthetic sequence derived from human genome
RKVLYCVVIIQKNYRAFLLRRRFLHLKKAAIVFQKQLRGQIARR

SEQ ID NO: 36021 - protein, 44 aa, Artificial Sequence
  Quasi-synthetic sequence derived from human genome
IFHFLYRKNRSRIPLLRKRWFQLGHSMNPRARKNRSRIPLLRKR

SEQ ID NO: 36022 - protein, 44 aa, Artificial Sequence
  Quasi-synthetic sequence derived from human genome
RARKKRSRIPLLRKRRFQLGRSMNPRARKNRSRIPLLRKRRFQL

SEQ ID NO: 36023 - protein, 44 aa, Artificial Sequence
  Quasi-synthetic sequence derived from human genome
WWRGVLVRRTLLVAALRAWMIQCWWRTLVQRRIRQRRQALLRVY

SEQ ID NO: 36024 - protein, 44 aa, Artificial Sequence
  Quasi-synthetic sequence derived from human genome
ALFVLTCVVLTFLGHRLLKRLLGPKLRRFLKPQGHPRLLLWFKR

SEQ ID NO: 36025 - protein, 44 aa, Artificial Sequence
  Quasi-synthetic sequence derived from human genome
RISKSKFSRYWRRWNRFCRRKCRAAVKSNVFYWLVIFLVFLNTL

SEQ ID NO: 36026 - protein, 44 aa, Artificial Sequence
  Quasi-synthetic sequence derived from human genome
IKLLPLRTFRVFRALKAISVVSRLKVIVGALLRSVKKLVNVIIL

SEQ ID NO: 36027 - protein, 44 aa, Artificial Sequence
  Quasi-synthetic sequence derived from human genome
RLYLQKKIIQKHFEKKKDIRRGIGYLKLICFLIPFLLSLKKKMK

SEQ ID NO: 36028 - protein, 44 aa, Artificial Sequence
  Quasi-synthetic sequence derived from human genome
LLLGPARLCLRLLLLLGYRRRCPPLLRGLVQRWRYGKVCLRSLL

SEQ ID NO: 36029 - protein, 44 aa, Artificial Sequence
  Quasi-synthetic sequence derived from human genome
WMRRMRILRRLLRRYRESKKIDRHMYHSLYLKVKGNVFKNKRIL

SEQ ID NO: 36030 - protein, 44 aa, Artificial Sequence
  Quasi-synthetic sequence derived from human genome
IRIQKTIRGWLLRKKYLRMRKAAITMQRYVRGYQARCYAKFLRR

SEQ ID NO: 36031 - protein, 44 aa, Artificial Sequence
  Quasi-synthetic sequence derived from human genome
RKNRSRIPLLRKRRFQLYRSTNPRARKNRSRIPLLRKRRFQLYR

SEQ ID NO: 36032 - protein, 44 aa, Artificial Sequence
  Quasi-synthetic sequence derived from human genome
RRWGQAISKSKLSRRWRRWNRFNRRRCRAAVKSVTFYWLVIVLV

SEQ ID NO: 36033 - protein, 44 aa, Artificial Sequence
  Quasi-synthetic sequence derived from human genome
YVPFIVTLLVYIKIYIVLRRRRKRVNTKRSSRAFRAHLRAPLKG

SEQ ID NO: 36034 - protein, 44 aa, Artificial Sequence
  Quasi-synthetic sequence derived from human genome
RCLNKIMKTRVCRRLRRANRVLRARCRRAVKSNACYWAVLLLVF

SEQ ID NO: 36035 - protein, 44 aa, Artificial Sequence
  Quasi-synthetic sequence derived from human genome
RRPWGAWLSARLWKWLKSPRSWRLGLALLLGGALLFWVLLHRRW

SEQ ID NO: 36036 - protein, 44 aa, Artificial Sequence
  Quasi-synthetic sequence derived from human genome
RIPLLRKRRFQLYRSMNPRARKNRSHIPLVRKRRFQLRRCMNPR

SEQ ID NO: 36037 - protein, 44 aa, Artificial Sequence
  Quasi-synthetic sequence derived from human genome
VIIQKNYRAFLLRRRFLHLKKAAIVFQKQLRGQIARRVYRQLLA

SEQ ID NO: 36038 - protein, 44 aa, Artificial Sequence
  Quasi-synthetic sequence derived from human genome
RKNRSRIPLLRKRRFQLGRSMNLRARKNRSQIVLFQKRRFQFFC

SEQ ID NO: 36039 - protein, 44 aa, Artificial Sequence
  Quasi-synthetic sequence derived from human genome
HFLYRKNRSRIPLLRKPWFQLGHSMNPRARKNRSRIPLLRKRRF

SEQ ID NO: 36040 - protein, 44 aa, Artificial Sequence
  Quasi-synthetic sequence derived from human genome
RLRELRIRCVARKFLYLWIRMTFGRVFPSKARFYYEQRLLRKVF

SEQ ID NO: 36041 - protein, 44 aa, Artificial Sequence
  Quasi-synthetic sequence derived from human genome
FLRRTKAATIIQKYWRMYVVRRRYKIRRAATIVLQSYLRGFLAR

SEQ ID NO: 36042 - protein, 44 aa, Artificial Sequence
  Quasi-synthetic sequence derived from human genome
RWTHLVRLLRLIILIRIFHLLHQKRQLEKLMRRLVSENKRRYTR

SEQ ID NO: 36043 - protein, 44 aa, Artificial Sequence
  Quasi-synthetic sequence derived from human genome
MNVRMPFRRKIYYLPRRYKFMSRIDKQISRFRRWLPKKPMRLDK

SEQ ID NO: 36044 - protein, 44 aa, Artificial Sequence
  Quasi-synthetic sequence derived from human genome
LKVLFKKTHRILRRLFNLCKRCHRQPRFRLPKERSLSYWWNRIQ

SEQ ID NO: 36045 - protein, 44 aa, Artificial Sequence
  Quasi-synthetic sequence derived from human genome
RLKNIRKVYGRCMWYRLRLLKPQPNIIPTVKKIVLLAGWALFLF

SEQ ID NO: 36046 - protein, 44 aa, Artificial Sequence
  Quasi-synthetic sequence derived from human genome
IQRALRAPRKKIHRRVLKKNPLKNLRIMLKLNPYAKTMRRNTIL

SEQ ID NO: 36047 - protein, 44 aa, Artificial Sequence
  Quasi-synthetic sequence derived from human genome
MMLVVFKSAPILKRALKVKQAMLQLYVLKLLKLQTKYLGRQWRK

SEQ ID NO: 36048 - protein, 44 aa, Artificial Sequence
  Quasi-synthetic sequence derived from human genome
RKNRSRIPLLRKRRFQLYRSMNSRARKNRSQIVLFQKRRFHFFC

SEQ ID NO: 36049 - protein, 44 aa, Artificial Sequence
  Quasi-synthetic sequence derived from human genome
FLRRRCFLLTFYLWFLFFSRFLLMLFLPLLTSVVTFLPPLRARR

SEQ ID NO: 36050 - protein, 44 aa, Artificial Sequence
  Quasi-synthetic sequence derived from human genome
VLLRRVTRNLVRNKLAVITRLLQNLIMGLFLLFFVLRVRSNVLK

SEQ ID NO: 36051 - protein, 44 aa, Artificial Sequence
  Quasi-synthetic sequence derived from human genome
IIRTPILMTILINFLIFIRILGILLSKLRTRQMRCRDYRLRLAR

SEQ ID NO: 36052 - protein, 44 aa, Artificial Sequence
  Quasi-synthetic sequence derived from human genome
RLPVKKIRKQMKLLLLLLLLSCAAWLTYVHLGLVRQGRALRQRL

SEQ ID NO: 36053 - protein, 44 aa, Artificial Sequence
  Quasi-synthetic sequence derived from human genome
ISKSKLSRRWRRWNRFNRRRCRAAVKSVTFYWLVIVLVFLNTLT

SEQ ID NO: 36054 - protein, 44 aa, Artificial Sequence
  Quasi-synthetic sequence derived from human genome
RKNRSRIPLLRKRRFQLYRSTNPRARKNRSRIPLLRKHRFQLYR

SEQ ID NO: 36055 - protein, 44 aa, Artificial Sequence
  Quasi-synthetic sequence derived from human genome
KLGLLLLTFLGIVAAVLVKKYQAVLRRKALLIFLVVHRLRWSSK

SEQ ID NO: 36056 - protein, 44 aa, Artificial Sequence
  Quasi-synthetic sequence derived from human genome
LRRIILLQRWFRVLLCRQHFLHLRQASVIIQRFWRNYLNQKQVR

SEQ ID NO: 36057 - protein, 44 aa, Artificial Sequence
  Quasi-synthetic sequence derived from human genome
IVAAMRRIRYEFKAKNIKKKKVSIMVSVDGVKVILKKKKKLLLL

SEQ ID NO: 36058 - protein, 44 aa, Artificial Sequence
  Quasi-synthetic sequence derived from human genome
IIQKYFFSPTLFRVIRLARIGRILRLIRGAKGIRTLLFALMMSL

SEQ ID NO: 36059 - protein, 44 aa, Artificial Sequence
  Quasi-synthetic sequence derived from human genome
LFRVIRLARIGRILRLIRAAKGIRTLLFALMMSLPALFNIGLLL

SEQ ID NO: 36060 - protein, 44 aa, Artificial Sequence
  Quasi-synthetic sequence derived from human genome
LLGRRGFSGRLGGYWKTWIFWKTWIFWKTWIFRKTYIGWKTWIF

SEQ ID NO: 36061 - protein, 44 aa, Artificial Sequence
  Quasi-synthetic sequence derived from human genome
RRKMNHHKYRKLVKKTRFLRRKVQEGRLRRKQIKFEKDLRRIWL

SEQ ID NO: 36062 - protein, 44 aa, Artificial Sequence
  Quasi-synthetic sequence derived from human genome
LLLLLLTFVLPLVVTLFCYCRISRRLRRPPHVGRARRNSLRIIF

SEQ ID NO: 36063 - protein, 44 aa, Artificial Sequence
  Quasi-synthetic sequence derived from human genome
LLRICRVLRSLKLLAQFRQIQIIILVLVRALKSMTFLLMLLLIF

SEQ ID NO: 36064 - protein, 44 aa, Artificial Sequence
  Quasi-synthetic sequence derived from human genome
FVRGYLVRKQMRLQRKAVISLQSYFRMRKARQYYLKMYKAIIVI

SEQ ID NO: 36065 - protein, 44 aa, Artificial Sequence
  Quasi-synthetic sequence derived from human genome
LVRKRRFQLRRCMNPRARKNRSQIVLFQKRRFHFFCSMSCRAWV

SEQ ID NO: 36066 - protein, 44 aa, Artificial Sequence
  Quasi-synthetic sequence derived from human genome
IFLGCCFFSTLVLLLSIAIFQRQKRRKFWKAKNLQHIPLKKGKR

SEQ ID NO: 36067 - protein, 44 aa, Artificial Sequence
  Quasi-synthetic sequence derived from human genome
KILTVRVILAPWKKGLIAVVIIGVIIALLIIAAKCYFLRKAKAK

SEQ ID NO: 36068 - protein, 44 aa, Artificial Sequence
  Quasi-synthetic sequence derived from human genome
IVTLLVYIKIYIVLRRRRKRVNTKRSSRAFRAHLRAPLKEAARR

SEQ ID NO: 36069 - protein, 44 aa, Artificial Sequence
  Quasi-synthetic sequence derived from human genome
FRVIRLARIGRILRLIRGAKGIRTLLFALMMSLPALFNIGLLLF

SEQ ID NO: 36070 - protein, 44 aa, Artificial Sequence
  Quasi-synthetic sequence derived from human genome
RTLDRRLRKNLRALVVVHATWYVKAFLALLRPFISSKFTRKIRF

SEQ ID NO: 36071 - protein, 44 aa, Artificial Sequence
  Quasi-synthetic sequence derived from human genome
RLLMSLFLFFFVLFLCLFFYNCYKGYLPRQCLKFRSALLIGKKK

SEQ ID NO: 36072 - protein, 44 aa, Artificial Sequence
  Quasi-synthetic sequence derived from human genome
LVGVLILFMFRRLRQFRQAQPTPQYRFRKRDKVMFYGRKIMRKV

SEQ ID NO: 36073 - protein, 44 aa, Artificial Sequence
  Quasi-synthetic sequence derived from human genome
LFRVIRLARIGRILRLIKGAKGIRTLLFALMMSLPALFNIGLLL

SEQ ID NO: 36074 - protein, 44 aa, Artificial Sequence
  Quasi-synthetic sequence derived from human genome
HPLRLRHLRRPRVARLLCLGVWALILVFAVPAARVHRPSRCRYR

SEQ ID NO: 36075 - protein, 44 aa, Artificial Sequence
  Quasi-synthetic sequence derived from human genome
PRGVGWRILKVLLWLLAILTGLIAGKFLFHQRLFGQLLRLKMFR

SEQ ID NO: 36076 - protein, 44 aa, Artificial Sequence
  Quasi-synthetic sequence derived from human genome
LYGKTRSRIPLLRKRRFQLCRCMNPRARKNRSQIVLFQKLRFQF

SEQ ID NO: 36077 - protein, 44 aa, Artificial Sequence
  Quasi-synthetic sequence derived from human genome
PVFWPILVMYFIMLFCITMKRQIKHMIKYRYIPFTHGKRRYRGK

SEQ ID NO: 36078 - protein, 44 aa, Artificial Sequence
  Quasi-synthetic sequence derived from human genome
LRILNKLTKWKHSRTMMLVVFKSAPILKRALKVKQAMMQLYVLK

SEQ ID NO: 36079 - protein, 44 aa, Artificial Sequence
  Quasi-synthetic sequence derived from human genome
LRLQALHRSRKLHQQYRLARQRIIQFQARCRAYLVRKAFRHRLW

SEQ ID NO: 36080 - protein, 44 aa, Artificial Sequence
  Quasi-synthetic sequence derived from human genome
LRLHCGLWVRRKAGYKKKLWKKTPARKKRLREFVFCNKTQSKLL

SEQ ID NO: 36081 - protein, 44 aa, Artificial Sequence
  Quasi-synthetic sequence derived from human genome
FRVIRLARIGRVLRLIRGAKGIRTLLFALMMSLPALFNIGLLLF

SEQ ID NO: 36082 - protein, 44 aa, Artificial Sequence
  Quasi-synthetic sequence derived from human genome
VASFLFVLMLLFFTILVLSYFRYMRIYRRYIYEPLHKPQRKRKK

SEQ ID NO: 36083 - protein, 44 aa, Artificial Sequence
  Quasi-synthetic sequence derived from human genome
LRALRFLSVISIVDPWIFIIFRSPVFRIFFHKIFIRPLRYRSRC

SEQ ID NO: 36084 - protein, 44 aa, Artificial Sequence
  Quasi-synthetic sequence derived from human genome
FLIAVRLASLNQILDPWVYLLLRKILLRKFCQMRKRRLREQFWR

SEQ ID NO: 36085 - protein, 44 aa, Artificial Sequence
  Quasi-synthetic sequence derived from human genome
RFLKIIRPLRNIFLKKPVFAKTVSIFIWFFLFFISLPNTILSNK

SEQ ID NO: 36086 - protein, 44 aa, Artificial Sequence
  Quasi-synthetic sequence derived from human genome
LRKRIHRPRRRTTRRWKRWFKFRKRKGEKRPRPNHKAVARRAKL

SEQ ID NO: 36087 - protein, 44 aa, Artificial Sequence
  Quasi-synthetic sequence derived from human genome
RAGAARVARWRRLRLQQLRRLRGLLRVLRGRPGAGSRRRGRMAL

SEQ ID NO: 36088 - protein, 44 aa, Artificial Sequence
  Quasi-synthetic sequence derived from human genome
RKNRSRIPLLRKHRFQLYRSMNSRARKNRSQIVLFQKRRFHFFC

SEQ ID NO: 36089 - protein, 44 aa, Artificial Sequence
  Quasi-synthetic sequence derived from human genome
FFRRKLIDAVGFSPLRILRKRNKALRKIRKLQKQGLLQVTPKGF

SEQ ID NO: 36090 - protein, 44 aa, Artificial Sequence
  Quasi-synthetic sequence derived from human genome
LPRRRGRPSRRFLGKKYRKYYYKSPKPLLRPFLCRICGSRFLSH

SEQ ID NO: 36091 - protein, 44 aa, Artificial Sequence
  Quasi-synthetic sequence derived from human genome
LKLTCSAFRLQRALRFLLGRLPWRVASGARRFRRWLNRYSYTVL

SEQ ID NO: 36092 - protein, 44 aa, Artificial Sequence
  Quasi-synthetic sequence derived from human genome
KTVKKKIKPTLPLRIFINVSRFFCVQLKKMVRLMYINSFISFPL

SEQ ID NO: 36093 - protein, 44 aa, Artificial Sequence
  Quasi-synthetic sequence derived from human genome
RSLTYFSARKGKRKTVKAVIDRFLRLHCGLWVRRKAGYKKKLWK

SEQ ID NO: 36094 - protein, 44 aa, Artificial Sequence
  Quasi-synthetic sequence derived from human genome
VIRRKVSKIQRFHARSLWTNHKRYGYKKHSYRLVKKLKLQKMKK

SEQ ID NO: 36095 - protein, 44 aa, Artificial Sequence
  Quasi-synthetic sequence derived from human genome
RARPGAWRRDIFGRIIWHKFKQWVIPWHLNKRYNRKRFFALPYV

SEQ ID NO: 36096 - protein, 44 aa, Artificial Sequence
  Quasi-synthetic sequence derived from human genome
SLDGTLKSRKRRKMSKKLPPVIIKYIIINRFRGRKNMLVKLGKI

SEQ ID NO: 36097 - protein, 44 aa, Artificial Sequence
  Quasi-synthetic sequence derived from human genome
IFNFILVVMFWLIFLLIILSYIKIGKNLLRISKRRSKFPNSGKY

SEQ ID NO: 36098 - protein, 44 aa, Artificial Sequence
  Quasi-synthetic sequence derived from human genome
ALVGVLILFMFRRLRQFRQAQPTPQYRFRKRDKVMFYGRKIMRK

SEQ ID NO: 36099 - protein, 44 aa, Artificial Sequence
  Quasi-synthetic sequence derived from human genome
RKLQKNLKTGSFLNRLGKLLLHLFMVLCLTLFLNNIIKKILNLK

SEQ ID NO: 36100 - protein, 44 aa, Artificial Sequence
  Quasi-synthetic sequence derived from human genome
IPKAKQRLKRLRNIHYLFNTALFLIAWRLLIARSQMARNVWFFI

SEQ ID NO: 36101 - protein, 44 aa, Artificial Sequence
  Quasi-synthetic sequence derived from human genome
LRVLRVLRPLKTIKRLPKLKAVFDCVVTSLKNVFNILIVYKLFM

SEQ ID NO: 36102 - protein, 44 aa, Artificial Sequence
  Quasi-synthetic sequence derived from human genome
VFIQAWWRGMLVRRTLLHAALRAWIIQCWWRQVLEKLLAKRRRM

SEQ ID NO: 36103 - protein, 44 aa, Artificial Sequence
  Quasi-synthetic sequence derived from human genome
KRMRVKKLPMILALHLKRFKYMEQLHRYTKLSYRVVFPLELRLF

SEQ ID NO: 36104 - protein, 44 aa, Artificial Sequence
  Quasi-synthetic sequence derived from human genome
LLQISKLKEVTLFVKRLRRKTYLSNMAKTMRMVLKSKRRVSVLK

SEQ ID NO: 36105 - protein, 44 aa, Artificial Sequence
  Quasi-synthetic sequence derived from human genome
RRLRRLAHLVLFCPFSKRLQGRLPGLRVRCIFLAWLGVFAGSWL

SEQ ID NO: 36106 - protein, 44 aa, Artificial Sequence
  Quasi-synthetic sequence derived from human genome
KRMKVKKLPMILALHLKRFKYMDQLHRYTKLSYRVVFPLELRLF

SEQ ID NO: 36107 - protein, 44 aa, Artificial Sequence
  Quasi-synthetic sequence derived from human genome
LLVKLRLCFLVMAYGTTIFHPLLYAFTRQKFQKVLKSKMKKRVV

SEQ ID NO: 36108 - protein, 44 aa, Artificial Sequence
  Quasi-synthetic sequence derived from human genome
NPRSLKHLCRLKIRKCMGRLHLRCPVFMSFLPLPNRLKAYVLYK

SEQ ID NO: 36109 - protein, 44 aa, Artificial Sequence
  Quasi-synthetic sequence derived from human genome
KFKLFTLVSACIPVFRLARRRKKILFYCHFPDLLLTKRDSFLKR

SEQ ID NO: 36110 - protein, 44 aa, Artificial Sequence
  Quasi-synthetic sequence derived from human genome
LGLLVAGVLVLLVSLGVAIHLCCRRRRARLRFMKQKFNIVCLKI

SEQ ID NO: 36111 - protein, 44 aa, Artificial Sequence
  Quasi-synthetic sequence derived from human genome
VATKIQAWWRGTLVRRALLHAALSACIIQCWWRLILSKILKKRR

SEQ ID NO: 36112 - protein, 44 aa, Artificial Sequence
  Quasi-synthetic sequence derived from human genome
VIIQKRVRGWLARTHYKRSMHAIIYLQCCFRRMMAKRELKKLKI

SEQ ID NO: 36113 - protein, 44 aa, Artificial Sequence
  Quasi-synthetic sequence derived from human genome
NLAEKAKRCNRRLKSQILLKKYLMKRRWKKNFIAVSAANRFKKI

SEQ ID NO: 36114 - protein, 44 aa, Artificial Sequence
  Quasi-synthetic sequence derived from human genome
KIQAAWRGFHWRQKFLRVKRSAICIQSWWRGTLGRRKAAKRKWA

SEQ ID NO: 36115 - protein, 44 aa, Artificial Sequence
  Quasi-synthetic sequence derived from human genome
KIFFRAGQVAYLEKLRADKLRAACIRIQKTIRGWLLRKKYLRMR

SEQ ID NO: 36116 - protein, 44 aa, Artificial Sequence
  Quasi-synthetic sequence derived from human genome
RMPFRRKIYYLPRRYKFMSRIDKQISRFRRWLPKKPMRLDKETL

SEQ ID NO: 36117 - protein, 44 aa, Artificial Sequence
  Quasi-synthetic sequence derived from human genome
GPVPLSVLILSLLVLFFSAVFVAAGLFAYVLRRRRKKLPFRSKR

SEQ ID NO: 36118 - protein, 44 aa, Artificial Sequence
  Quasi-synthetic sequence derived from human genome
AMWRRYRAKKYLCKVKAACKIQAWYRCWRAHKEYLAILKAVKII

SEQ ID NO: 36119 - protein, 44 aa, Artificial Sequence
  Quasi-synthetic sequence derived from human genome
ALFVYLNRKIVQVMRKQKTINRFLMRKRLLFPALVTLLISTLTF

SEQ ID NO: 36120 - protein, 44 aa, Artificial Sequence
  Quasi-synthetic sequence derived from human genome
GWTHLVRLLRLIILIRIFHLLHQKRQLEKLMRRLVSENKRRYTR

SEQ ID NO: 36121 - protein, 44 aa, Artificial Sequence
  Quasi-synthetic sequence derived from human genome
WLIISCSIAYVALVTLLIWVPVKVILHKKRYIYRKIKGWRPVLM

SEQ ID NO: 36122 - protein, 44 aa, Artificial Sequence
  Quasi-synthetic sequence derived from human genome
LKRLVKLHIKRHYHKKFWKLGAVIFFFIIVLVLMQREVSVQYSK

SEQ ID NO: 36123 - protein, 44 aa, Artificial Sequence
  Quasi-synthetic sequence derived from human genome
RGFLARRRYRKMLEEHKAVILQKYARAWLARRRFQSIRRFVLNI

SEQ ID NO: 36124 - protein, 44 aa, Artificial Sequence
  Quasi-synthetic sequence derived from human genome
QATWKCYKARKFFLFYRQQKWASGVIAIAWLLYCHKTRLKKILK

SEQ ID NO: 36125 - protein, 44 aa, Artificial Sequence
  Quasi-synthetic sequence derived from human genome
LLVLLALAAWASRWLRRKLRARRKGGAPVHVRHMYSTRRPLRSM

SEQ ID NO: 36126 - protein, 44 aa, Artificial Sequence
  Quasi-synthetic sequence derived from human genome
RKKRSWYLTWKYKLTNQRALRRFCQTGAVLFLLVTVIVNIKLIL

SEQ ID NO: 36127 - protein, 44 aa, Artificial Sequence
  Quasi-synthetic sequence derived from human genome
LRALRLLRIFKVTKYWASLRNLVVSLLNSMKSIISLLFLLFLFI

SEQ ID NO: 36128 - protein, 44 aa, Artificial Sequence
  Quasi-synthetic sequence derived from human genome
WIFWKTWIFRKTYIGWKTWIFSGRCGLTGRPGFGGRRRFFWKTL

SEQ ID NO: 36129 - protein, 44 aa, Artificial Sequence
  Quasi-synthetic sequence derived from human genome
RWQRRLRRAARRQVLSGHLPFCRFRLRYPSLSPSAFWVWKSLAR

SEQ ID NO: 36130 - protein, 44 aa, Artificial Sequence
  Quasi-synthetic sequence derived from human genome
LRALRLLRIFKITKYWASLRNLVVSLMSSMKSIISLLFLLFLFI

SEQ ID NO: 36131 - protein, 44 aa, Artificial Sequence
  Quasi-synthetic sequence derived from human genome
YKIRRAATIVLQSYLRGFLARNRYRKILREHKAVIIQKRVRGWL

SEQ ID NO: 36132 - protein, 44 aa, Artificial Sequence
  Quasi-synthetic sequence derived from human genome
WKKVQWCSLSVIKLKNKIKYRAEACIKMQKTIRMWLCKRRHKPR

SEQ ID NO: 36133 - protein, 44 aa, Artificial Sequence
  Quasi-synthetic sequence derived from human genome
LKKKRRNFAELKIKRLRKKFAQKMLRKARRKLIYEKAKHYHKEY

SEQ ID NO: 36134 - protein, 44 aa, Artificial Sequence
  Quasi-synthetic sequence derived from human genome
WRRDIFGRIIWHKFKQWVIPWHLNKRYNRKRFFALPYVDHFLRL

SEQ ID NO: 36135 - protein, 44 aa, Artificial Sequence
  Quasi-synthetic sequence derived from human genome
KVFHKYSNRNKVRHTKKKTFKCIKCSKSFFMLSCLIRHKRIHIR

SEQ ID NO: 36136 - protein, 44 aa, Artificial Sequence
  Quasi-synthetic sequence derived from human genome
KFLSLANKRLPVKRAAVQFLNNAWGIQKKQNAKRFKRRWMVRKM

SEQ ID NO: 36137 - protein, 44 aa, Artificial Sequence
  Quasi-synthetic sequence derived from human genome
AFHRWKVVLLVRTDKRSDSLIRKKFRMMKIPKPILFGLNIAMKK

SEQ ID NO: 36138 - protein, 44 aa, Artificial Sequence
  Quasi-synthetic sequence derived from human genome
ARLFRIKCVTRIQAYWRGCVVRKWYRNLRKTVPPTDAKLRKKFF

SEQ ID NO: 36139 - protein, 44 aa, Artificial Sequence
  Quasi-synthetic sequence derived from human genome
LKSARYFLWHTYRWLLLKLLLLLLLLLLLALFLYSVPGYLVKKI

SEQ ID NO: 36140 - protein, 44 aa, Artificial Sequence
  Quasi-synthetic sequence derived from human genome
RRLRKNLKSLIIVHPSWFIRTLLAVTRPFISSKFSQKIRYVFNL

SEQ ID NO: 36141 - protein, 44 aa, Artificial Sequence
  Quasi-synthetic sequence derived from human genome
KVIFWLGYFNSCVNPLIYPCSSREFKRAFLRLLRCQCRRRRRRR

SEQ ID NO: 36142 - protein, 44 aa, Artificial Sequence
  Quasi-synthetic sequence derived from human genome
KECNFFLIAVRLASLNQILDPWVYLLLRKILLRKFCQMRKRRLR

SEQ ID NO: 36143 - protein, 44 aa, Artificial Sequence
  Quasi-synthetic sequence derived from human genome
GPKAALAVIRGGATRAAGVFYPWRFRLLCLLRRWLPRPRAWFIR

SEQ ID NO: 36144 - protein, 44 aa, Artificial Sequence
  Quasi-synthetic sequence derived from human genome
KINLAVANTGILVFQGFTKINAFNWAKVRKLSFKRKRFLIKLRP

SEQ ID NO: 36145 - protein, 44 aa, Artificial Sequence
  Quasi-synthetic sequence derived from human genome
RKYKKNLKALYVVHPTSFIKVLWNILKPLISHKFGKKVIYFNYL

SEQ ID NO: 36146 - protein, 44 aa, Artificial Sequence
  Quasi-synthetic sequence derived from human genome
LRALRLLRIFKVTKYWSSLRNLVVSLLNSMKSIISLLFLLFLFI

SEQ ID NO: 36147 - protein, 44 aa, Artificial Sequence
  Quasi-synthetic sequence derived from human genome
RRQKLLLAQLHHRKRVKAAGQIQAWWRGVLVRRTLLVAALRAWM

SEQ ID NO: 36148 - protein, 44 aa, Artificial Sequence
  Quasi-synthetic sequence derived from human genome
LVKPKIVKKRTKKFIRHQSDRYVKIKRNWRKPRGIDNRVRRRFK

SEQ ID NO: 36149 - protein, 44 aa, Artificial Sequence
  Quasi-synthetic sequence derived from human genome
IILFCSFKIVWSLRRRQQLARQARMKKATRFIMVVAIVFITCYL

SEQ ID NO: 36150 - protein, 44 aa, Artificial Sequence
  Quasi-synthetic sequence derived from human genome
FRIQEVLKHARHFRGRKNRCYRLAVRTVIRAFVKCTKARYLKKK

SEQ ID NO: 36151 - protein, 44 aa, Artificial Sequence
  Quasi-synthetic sequence derived from human genome
LVCLFFVFLSLLEYVYINYLFYSRGPRRQPRRHRRPRRVIARYR

SEQ ID NO: 36152 - protein, 44 aa, Artificial Sequence
  Quasi-synthetic sequence derived from human genome
LRIIRLVRVFRIFKLSRHSKGLQILGHTLRASMRELGLLIFFLF

SEQ ID NO: 36153 - protein, 44 aa, Artificial Sequence
  Quasi-synthetic sequence derived from human genome
RKQIKRKAPRGFLKRVFKRKKPQLRLEKSGDLLVHLNCLLFVHR

SEQ ID NO: 36154 - protein, 44 aa, Artificial Sequence
  Quasi-synthetic sequence derived from human genome
FILYFKPSVFRCIALRWVRLLGFAIVYGTIILKLYRVLQLFLSR

SEQ ID NO: 36155 - protein, 44 aa, Artificial Sequence
  Quasi-synthetic sequence derived from human genome
LVLRLLRALRVLYVMRLARHSLGLRSLGLTMRRCAREFGLLLLF

SEQ ID NO: 36156 - protein, 44 aa, Artificial Sequence
  Quasi-synthetic sequence derived from human genome
KYWRRVLAQRKLLMLKKEKLEKVQNKAASLIQAMWRRYRAKKYL

SEQ ID NO: 36157 - protein, 44 aa, Artificial Sequence
  Quasi-synthetic sequence derived from human genome
MKFIVWRRFKWVIIGLLFLLILLLFVAVLLYSLPNYLSMKIVKP

SEQ ID NO: 36158 - protein, 44 aa, Artificial Sequence
  Quasi-synthetic sequence derived from human genome
WLARLLRSRAGSRKRPLTLLQRAGLLLLLGLLGFLALLALMSRL

SEQ ID NO: 36159 - protein, 44 aa, Artificial Sequence
  Quasi-synthetic sequence derived from human genome
LCKLLRFFYSLFFPGLIVCGTLCVCLVIVLWGIRLLLQRKKKLV

SEQ ID NO: 36160 - protein, 44 aa, Artificial Sequence
  Quasi-synthetic sequence derived from human genome
KSIKYLICTRYKWLIIKIVLALLGLLMLGLFLYSLPGYMVKKLL

SEQ ID NO: 36161 - protein, 44 aa, Artificial Sequence
  Quasi-synthetic sequence derived from human genome
GKLLSVFRQPLSSLWRSLVPLFCWLRATFWLLATKRRKQQLVLR

SEQ ID NO: 36162 - protein, 44 aa, Artificial Sequence
  Quasi-synthetic sequence derived from human genome
TLFKCLLLTGGCTLLHCFVILPVFLTFFPPSKKHHKKKKRAKRK

SEQ ID NO: 36163 - protein, 44 aa, Artificial Sequence
  Quasi-synthetic sequence derived from human genome
RRRRAMRAFRMLLYSKSTSLTFHWKLWGRHRGRRRGLAHPKNHL

SEQ ID NO: 36164 - protein, 44 aa, Artificial Sequence
  Quasi-synthetic sequence derived from human genome
ILAKISRPKKRAKTITFSKNAVISKRGGKLCLLIRVANLRKSLL

SEQ ID NO: 36165 - protein, 44 aa, Artificial Sequence
  Quasi-synthetic sequence derived from human genome
LGFIVPFAIIGLCYSLIVRVLVRAHRHRGLRPRRQKALRMILAV

SEQ ID NO: 36166 - protein, 44 aa, Artificial Sequence
  Quasi-synthetic sequence derived from human genome
RCRGRKRCIKKFSIQRFPKILVLHLKRFSESRIRTSKLTTFVNF

SEQ ID NO: 36167 - protein, 44 aa, Artificial Sequence
  Quasi-synthetic sequence derived from human genome
VVRKILLLQSWFRMVLERRHFLQMKRAAVTIQACWRSYRVRRAL

SEQ ID NO: 36168 - protein, 44 aa, Artificial Sequence
  Quasi-synthetic sequence derived from human genome
RRPRPRRELSLGRKKAPHRLCGRFSRISMKLPRIPLRRQKLPKV

SEQ ID NO: 36169 - protein, 44 aa, Artificial Sequence
  Quasi-synthetic sequence derived from human genome
IRNIGIWFFWIRLYKIRRGRTRPQALLFLCMILLLIVLHTSYMI

SEQ ID NO: 36170 - protein, 44 aa, Artificial Sequence
  Quasi-synthetic sequence derived from human genome
TFRIKRFLAKKQKQNRPIPQWIRMKTGNKIRYNSKRRHWRRTKL

SEQ ID NO: 36171 - protein, 44 aa, Artificial Sequence
  Quasi-synthetic sequence derived from human genome
KLVSPKWKNFKGLKLLCRDKIRLNNAIWRAWYIQYVKRRKSPVC

SEQ ID NO: 36172 - protein, 44 aa, Artificial Sequence
  Quasi-synthetic sequence derived from human genome
SRRCKKRMFKFHQMKHIFEILDKMRCLRKRSTVSFLGVLVIFLL

SEQ ID NO: 36173 - protein, 44 aa, Artificial Sequence
  Quasi-synthetic sequence derived from human genome
RPIGKAKPKKQSKKKVPFWNVQNKIILFTVFLFILAVIAWTLLW

SEQ ID NO: 36174 - protein, 44 aa, Artificial Sequence
  Quasi-synthetic sequence derived from human genome
RRPRIHFRFPNRPFVPSRCNHRFPFQPFYWPHRYLTYRYFPRRR

SEQ ID NO: 36175 - protein, 44 aa, Artificial Sequence
  Quasi-synthetic sequence derived from human genome
WLLRTGGWKVSAVTLAYLIFCLCSLVGILHLQRALVLRRKRKRM

SEQ ID NO: 36176 - protein, 44 aa, Artificial Sequence
  Quasi-synthetic sequence derived from human genome
LKYQKILWKVPSFLITQVRRMNEATMLLKKQLPSVRKLLRRKTL

SEQ ID NO: 36177 - protein, 44 aa, Artificial Sequence
  Quasi-synthetic sequence derived from human genome
RLARIGRILRLIKGAKGIRTLLFALMMSLPALFNIGLLLFLVMF

SEQ ID NO: 36178 - protein, 44 aa, Artificial Sequence
  Quasi-synthetic sequence derived from human genome
KSLRVLRVLRPLKTIKRLPKLKAVFDCVVNSLKNVFNILIVYML

SEQ ID NO: 36179 - protein, 44 aa, Artificial Sequence
  Quasi-synthetic sequence derived from human genome
KSLRVLRVLRPLKTIKRLPKLKAVFDCVVNSLKNVLNILIVYML

SEQ ID NO: 36180 - protein, 44 aa, Artificial Sequence
  Quasi-synthetic sequence derived from human genome
PNIPKLNRFLLLFIGFVCVLLSFFMARVFMRMKLPRSLALLPRL

SEQ ID NO: 36181 - protein, 44 aa, Artificial Sequence
  Quasi-synthetic sequence derived from human genome
LIQGYWRRYSTRQRFLKLKYYSIILQSRIRMIIAVTSYKRYLWA

SEQ ID NO: 36182 - protein, 44 aa, Artificial Sequence
  Quasi-synthetic sequence derived from human genome
KKPSFMVIRFPGRRGYGRLRPRARSLSKASTAINWLTKKFLLKK

SEQ ID NO: 36183 - protein, 44 aa, Artificial Sequence
  Quasi-synthetic sequence derived from human genome
LFRKWKAFSVWRKNVRSKKITGCQKSLQKNLFIVNPHLRPALLK

SEQ ID NO: 36184 - protein, 44 aa, Artificial Sequence
  Quasi-synthetic sequence derived from human genome
LRIIRLVRVFRIFKLSRHSKGLQILGQTLKASMRELGLLIFFLF

SEQ ID NO: 36185 - protein, 44 aa, Artificial Sequence
  Quasi-synthetic sequence derived from human genome
RRRPARTLGLLLLVVLGFLVLRRLDWSTLVPLRLRHRQLGLQAK

SEQ ID NO: 36186 - protein, 44 aa, Artificial Sequence
  Quasi-synthetic sequence derived from human genome
VTAVLILLVVRRLRVPKTPAPDGPRYRFRKRDKVLFYGRKIMRK

SEQ ID NO: 36187 - protein, 44 aa, Artificial Sequence
  Quasi-synthetic sequence derived from human genome
HLLKIKNTFCLWKRLIKLKDNHCEQLRVKIRKLKNKASVLQKRI

SEQ ID NO: 36188 - protein, 44 aa, Artificial Sequence
  Quasi-synthetic sequence derived from human genome
VMKFFRWVRRAWQRIISWVFFWRQKIKPTISGHPDSKKHSLKKM

SEQ ID NO: 36189 - protein, 44 aa, Artificial Sequence
  Quasi-synthetic sequence derived from human genome
SSRRRGFGLFFFLRLHRLLLLFLVLRGTLANKLNVPQVLLPFGR

SEQ ID NO: 36190 - protein, 44 aa, Artificial Sequence
  Quasi-synthetic sequence derived from human genome
FYFLYGKTRSRIPLVRNRRFQLCRCMNPRARKNRSQIALFQKLR

SEQ ID NO: 36191 - protein, 44 aa, Artificial Sequence
  Quasi-synthetic sequence derived from human genome
KTHCLATKKLDLWRLPPILIIHLKRFQFVNGRWIKSQKIVKFPR

SEQ ID NO: 36192 - protein, 44 aa, Artificial Sequence
  Quasi-synthetic sequence derived from human genome
YWLKLVKGILPLVGMAMVPALLGLIGYHLYRKANRPKVSKKKLK

SEQ ID NO: 36193 - protein, 44 aa, Artificial Sequence
  Quasi-synthetic sequence derived from human genome
HMGVLVLRGNTKINTFNWAKIRKLSFKRKHFLIKLHANILVLCK

SEQ ID NO: 36194 - protein, 44 aa, Artificial Sequence
  Quasi-synthetic sequence derived from human genome
RLAFQGWLRRGVLLVRAPPACLQVLRDAWRRRALRPPRGFRIRA

SEQ ID NO: 36195 - protein, 44 aa, Artificial Sequence
  Quasi-synthetic sequence derived from human genome
FKLLILLIGTWALFFRKRRADMPRVFVFRALLLVLIFLFVVSYW

SEQ ID NO: 36196 - protein, 44 aa, Artificial Sequence
  Quasi-synthetic sequence derived from human genome
RFLNLKKTIIKFQAHVRKHQQRQKYKKMKKAAVIIQTHFRAYIF

SEQ ID NO: 36197 - protein, 44 aa, Artificial Sequence
  Quasi-synthetic sequence derived from human genome
RMIDYRHFVPQMPFVPAVAKSIPRKRISLKRPKKCFRNLFHIRR

SEQ ID NO: 36198 - protein, 44 aa, Artificial Sequence
  Quasi-synthetic sequence derived from human genome
RLFRAARLIKLLRQGYTIRILLWTFVQSFKALPYVCLLIAMLFF

SEQ ID NO: 36199 - protein, 44 aa, Artificial Sequence
  Quasi-synthetic sequence derived from human genome
LRTLFRSRSKRRHRTVKLIFAIVVAYFLSWGPYNFTLFLQTLFR

SEQ ID NO: 36200 - protein, 44 aa, Artificial Sequence
  Quasi-synthetic sequence derived from human genome
RCLGRREYVKKRQAAIKLEAHWRGALARKAIQRRKWAVRIIRKF

SEQ ID NO: 36201 - protein, 44 aa, Artificial Sequence
  Quasi-synthetic sequence derived from human genome
LRTAMRRQMRRHASRRGPSRRRLGRLWNRLFHRPRAPRGQIPLL

SEQ ID NO: 36202 - protein, 44 aa, Artificial Sequence
  Quasi-synthetic sequence derived from human genome
MIAHLGVFPSKAERKITSRPFTRFRTAVRVVIAILRLRFLVKKW

SEQ ID NO: 36203 - protein, 44 aa, Artificial Sequence
  Quasi-synthetic sequence derived from human genome
MKLLKLRRNIVKLSLYRHFTNTLILAVAASIVFIIWTTMKFRIV

SEQ ID NO: 36204 - protein, 44 aa, Artificial Sequence
  Quasi-synthetic sequence derived from human genome
LFAKLFGHLTSARRARKSEVPHFRLKKVQNIKMWLSLRSYLKRR

SEQ ID NO: 36205 - protein, 44 aa, Artificial Sequence
  Quasi-synthetic sequence derived from human genome
RCRAYLVRKAFRHRLWAVLTVQAYARGMIARRLHQRLRAEYLWR

SEQ ID NO: 36206 - protein, 44 aa, Artificial Sequence
  Quasi-synthetic sequence derived from human genome
RLARIGRILRLVKGAKGIRTLLFALMMSLPALFNIGLLLFLVMF

SEQ ID NO: 36207 - protein, 44 aa, Artificial Sequence
  Quasi-synthetic sequence derived from human genome
TLARRKGRHMGIGKRKGTANARMPEKVTWMRRMRILRRLLRRYR

SEQ ID NO: 36208 - protein, 44 aa, Artificial Sequence
  Quasi-synthetic sequence derived from human genome
FKCLYYLIWKNYKKYIIIAFILIILIIFLVLFIYTLPGAISRRI

SEQ ID NO: 36209 - protein, 44 aa, Artificial Sequence
  Quasi-synthetic sequence derived from human genome
VKQMRARRKTAKMLMVVLLVFALCYLPISVLNVLKRVFGMFRQA

SEQ ID NO: 36210 - protein, 44 aa, Artificial Sequence
  Quasi-synthetic sequence derived from human genome
YLRGDRGQILVICLIAVMVVFIILVIGVCTCCHPLRKRRKRKKK

SEQ ID NO: 36211 - protein, 44 aa, Artificial Sequence
  Quasi-synthetic sequence derived from human genome
ILLRDLPTLKAAVIVAFAFTTLLIACLLLRVFRSGKRLKKTRKY

SEQ ID NO: 36212 - protein, 44 aa, Artificial Sequence
  Quasi-synthetic sequence derived from human genome
KLFRAARLIKLLRQGYTIRILLWTFVQSFKALPYVCLLIAMLFF

SEQ ID NO: 36213 - protein, 44 aa, Artificial Sequence
  Quasi-synthetic sequence derived from human genome
FLIIVGICLILIVIFMITKFVQDRHRARRNRLRKDQLKKLPVHK

SEQ ID NO: 36214 - protein, 44 aa, Artificial Sequence
  Quasi-synthetic sequence derived from human genome
RRLQTQVFKLGLAKSIHHARVLIRQRHIRVRKQVVNIPSFIVRL

SEQ ID NO: 36215 - protein, 44 aa, Artificial Sequence
  Quasi-synthetic sequence derived from human genome
LRVIRLVRVFRIFKLSRHSKGLQILGQTLKASMRELGLLIFFLF

SEQ ID NO: 36216 - protein, 44 aa, Artificial Sequence
  Quasi-synthetic sequence derived from human genome
LRVIRLVRVFRIFKLSRHSKGLQILGKTLQASMRELGLLIFFLF

SEQ ID NO: 36217 - protein, 44 aa, Artificial Sequence
  Quasi-synthetic sequence derived from human genome
FLKKLLGKKLTRCLKPFENSRLRLWTKWVFAGVSLVGLILWLAL

SEQ ID NO: 36218 - protein, 44 aa, Artificial Sequence
  Quasi-synthetic sequence derived from human genome
LRKYIYIRSCVVIIQKRFRCFQAQKLYKRRKESILTIQKYYKAY

SEQ ID NO: 36219 - protein, 44 aa, Artificial Sequence
  Quasi-synthetic sequence derived from human genome
WLKKCYQMIDRRLRKNLKSLIIVHPSWFIRTVLAISRPFISVKF

SEQ ID NO: 36220 - protein, 44 aa, Artificial Sequence
  Quasi-synthetic sequence derived from human genome
KCIRAKIQDYHILTRKRIRYRFRRFIQQFSQCKATARNLKLKYL

SEQ ID NO: 36221 - protein, 44 aa, Artificial Sequence
  Quasi-synthetic sequence derived from human genome
MGFVRQIQLLLWKNWTLRKRQKIRFVVELVWPLSLFLVLIWLRN

SEQ ID NO: 36222 - protein, 44 aa, Artificial Sequence
  Quasi-synthetic sequence derived from human genome
GILRRKLYIHRVTLRKLLPGVQYVYRCGSAQGWSRRFRFRALKN

SEQ ID NO: 36223 - protein, 44 aa, Artificial Sequence
  Quasi-synthetic sequence derived from human genome
LKRLRLLPALLILRAFKPHRKIRDYRVVVVGTAGVGKSTLLHKW

SEQ ID NO: 36224 - protein, 44 aa, Artificial Sequence
  Quasi-synthetic sequence derived from human genome
RAYWRAAVPIGLLVCLCLLQAFGYRLRRVIAAFYFPKREKKRIL

SEQ ID NO: 36225 - protein, 44 aa, Artificial Sequence
  Quasi-synthetic sequence derived from human genome
RVIRLVRVFRIFKLSRHSKGLQILGQTLKASMRELGLLIFFLFI

SEQ ID NO: 36226 - protein, 44 aa, Artificial Sequence
  Quasi-synthetic sequence derived from human genome
MRFQQFLFAFFIFIMSLLLISGQRPVNLTMRRKLRKHNCLQRRC

SEQ ID NO: 36227 - protein, 44 aa, Artificial Sequence
  Quasi-synthetic sequence derived from human genome
RRPDTSFLWFTSPYKTMKFILWRRFRWAIILFIILFILLLFLAI

SEQ ID NO: 36228 - protein, 44 aa, Artificial Sequence
  Quasi-synthetic sequence derived from human genome
LWFAAWLKVFYCLRIANFNHPLFFLMKRKIIVLMPWLLRLSVLV

SEQ ID NO: 36229 - protein, 44 aa, Artificial Sequence
  Quasi-synthetic sequence derived from human genome
WIQYHSLDVIAFLLACVATVIFIITKFCLFCFRKLAKKGKKKKR

SEQ ID NO: 36230 - protein, 44 aa, Artificial Sequence
  Quasi-synthetic sequence derived from human genome
LLLLLVVCGIGCVWHWKHRVATRFTLPRFLQRRSSRRKVCTKTF

SEQ ID NO: 36231 - protein, 44 aa, Artificial Sequence
  Quasi-synthetic sequence derived from human genome
LLFARGAPAWLRRRYLRLRYEDLVRQPRAQLRRLLRFSGLRALA

SEQ ID NO: 36232 - protein, 44 aa, Artificial Sequence
  Quasi-synthetic sequence derived from human genome
VLPLLVMAICYTGIIKTLLRCPSKKKYKAIRLIFVIMAVFFIFW

SEQ ID NO: 36233 - protein, 44 aa, Artificial Sequence
  Quasi-synthetic sequence derived from human genome
RLRKRVNAALVIQKYWRRVLAQRKLLMLKKEKLEKVQNKAASLI

SEQ ID NO: 36234 - protein, 44 aa, Artificial Sequence
  Quasi-synthetic sequence derived from human genome
IYLRLLVKLYRFLARRTNSTFNQVVLKRLFMSRTNRPPLSLSRM

SEQ ID NO: 36235 - protein, 44 aa, Artificial Sequence
  Quasi-synthetic sequence derived from human genome
KRATLKNLRKQYRNVKKMTAKELVKVLFSFFWMLFVGLFQLLFT

SEQ ID NO: 36236 - protein, 44 aa, Artificial Sequence
  Quasi-synthetic sequence derived from human genome
FLRVVRFVRILRIFKLTRHFVGLRVLGHTLRASTNEFLLLIIFL

SEQ ID NO: 36237 - protein, 44 aa, Artificial Sequence
  Quasi-synthetic sequence derived from human genome
RFRTLMMRRRFLSLKKTAILIQRKYRAHLCTKHHLQFLQVQNAV

SEQ ID NO: 36238 - protein, 44 aa, Artificial Sequence
  Quasi-synthetic sequence derived from human genome
RYLAICRPLRARVLVTRRRVRALIAVLWAVALLSAGPFLFLVGV

SEQ ID NO: 36239 - protein, 44 aa, Artificial Sequence
  Quasi-synthetic sequence derived from human genome
ARMRGFQARKRYLRRRAALGQLNTILLVAQPLLQRRQRLQLGRW

SEQ ID NO: 36240 - protein, 44 aa, Artificial Sequence
  Quasi-synthetic sequence derived from human genome
LRKSLKIIYLNSIQQLEIRNMSWPRLIRKLRCYLKEMKNLRKLV

SEQ ID NO: 36241 - protein, 44 aa, Artificial Sequence
  Quasi-synthetic sequence derived from human genome
KLCSRFLLKCGFITIPWRCIKKCSPLMPRAAVPRFVQQKLYLFL

SEQ ID NO: 36242 - protein, 44 aa, Artificial Sequence
  Quasi-synthetic sequence derived from human genome
ISVVKILRVLRVLRPLRAINRAKGLKHVVQCVFVAIRTIGNIMI

SEQ ID NO: 36243 - protein, 44 aa, Artificial Sequence
  Quasi-synthetic sequence derived from human genome
LFAKLFSHITSARKARKYEIPHFRLKKVENIKIWLSLRSYLKRR

SEQ ID NO: 36244 - protein, 44 aa, Artificial Sequence
  Quasi-synthetic sequence derived from human genome
KNLLCLFCLKLFKTAIPYMNHCWRHSRRRVLQCSKCRLQFLTLK

SEQ ID NO: 36245 - protein, 44 aa, Artificial Sequence
  Quasi-synthetic sequence derived from human genome
LRRIRAAVVLQKHYRMQRARQAYQRVRRAAVVIQAFTRAMFVRR

SEQ ID NO: 36246 - protein, 44 aa, Artificial Sequence
  Quasi-synthetic sequence derived from human genome
KHFLRMLIQVCLYFYCKFLWRCLKFVMRKLTGRCELQRICYNTK

SEQ ID NO: 36247 - protein, 44 aa, Artificial Sequence
  Quasi-synthetic sequence derived from human genome
KQFVWYTPPTFMIAVFLPIVVLIFKSILFLPCLRKKILKIRHGW

SEQ ID NO: 36248 - protein, 44 aa, Artificial Sequence
  Quasi-synthetic sequence derived from human genome
LSLPKYKKNLKALYVVHPTSFIKVLWNILKPLISHKFGKKVIYF

SEQ ID NO: 36249 - protein, 44 aa, Artificial Sequence
  Quasi-synthetic sequence derived from human genome
ISTRSIAIIVPLVLLVTLITTLVIGLVLCKRKRRTKTIRRQPII

SEQ ID NO: 36250 - protein, 44 aa, Artificial Sequence
  Quasi-synthetic sequence derived from human genome
INVVKILRVLRVLRPLRAINRAKGLKHVVQCVFVAIRTIGNIVI

SEQ ID NO: 36251 - protein, 44 aa, Artificial Sequence
  Quasi-synthetic sequence derived from human genome
RIIFPFGFKFNIAVGLILCISLVILTFQWRFYLSFRKLMRWILI

SEQ ID NO: 36252 - protein, 44 aa, Artificial Sequence
  Quasi-synthetic sequence derived from human genome
ILKGKKCIVLVTELMTSGTLKTYLKRFKVMKPKVLRSWCRQILK

SEQ ID NO: 36253 - protein, 44 aa, Artificial Sequence
  Quasi-synthetic sequence derived from human genome
RRRHWAVKMVTCFIIGLLFPVFSVCYLIAPKSPLGLFIRKPFIK

SEQ ID NO: 36254 - protein, 44 aa, Artificial Sequence
  Quasi-synthetic sequence derived from human genome
ELYMCHKCKKKQKSTKKFWIQKLPKVLCLHLKRFHWTAYLRNKV

SEQ ID NO: 36255 - protein, 44 aa, Artificial Sequence
  Quasi-synthetic sequence derived from human genome
EQYFALRRKKKKTIKMLMLVVVLFALCWFPLNCYVLLLSSKVIR

SEQ ID NO: 36256 - protein, 44 aa, Artificial Sequence
  Quasi-synthetic sequence derived from human genome
KAKKAQLMQYLSLPKTPKMLKMSKGLDARSKRWLKIIWRRHGIW

SEQ ID NO: 36257 - protein, 44 aa, Artificial Sequence
  Quasi-synthetic sequence derived from human genome
LLLQKLLKDGGVLSPILTRLMNFFVFSRGLLQYINQRKKFRRRW

SEQ ID NO: 36258 - protein, 44 aa, Artificial Sequence
  Quasi-synthetic sequence derived from human genome
LIILFYQKVIKYIWRIGTDGRTVRRTMNIVPRTKVKTIKMFLIL

SEQ ID NO: 36259 - protein, 44 aa, Artificial Sequence
  Quasi-synthetic sequence derived from human genome
RRASRGPIAFWARRASRTRLAAWARRALLSLRSPKARRGKARRR

SEQ ID NO: 36260 - protein, 44 aa, Artificial Sequence
  Quasi-synthetic sequence derived from human genome
KSCKPIPVMLLGVTLLKKKYPLAKYLCVLLIVAGVALFMYKPKK

SEQ ID NO: 36261 - protein, 44 aa, Artificial Sequence
  Quasi-synthetic sequence derived from human genome
CWGALAAQLALLGLGLLHALLLVLLLCRLRRLRARARARAAARL

SEQ ID NO: 36262 - protein, 44 aa, Artificial Sequence
  Quasi-synthetic sequence derived from human genome
GKKVLNLLKGAFPARLKKVLIVGAPIWFRVPYSIISLLLKDKVR

SEQ ID NO: 36263 - protein, 44 aa, Artificial Sequence
  Quasi-synthetic sequence derived from human genome
MFYLLRIANFSNLIFLRIKRRVKSVVLVILLGPLLFLVCHLFVI

SEQ ID NO: 36264 - protein, 44 aa, Artificial Sequence
  Quasi-synthetic sequence derived from human genome
YRYKKNLKALYVVHPTSFIKVLWNILKPLISHKFGKKVIYFNYL

SEQ ID NO: 36265 - protein, 44 aa, Artificial Sequence
  Quasi-synthetic sequence derived from human genome
PRMGVGCRLSRALLTAVTNVLIFFWCLAFLWGLLILLKYRWRKL

SEQ ID NO: 36266 - protein, 44 aa, Artificial Sequence
  Quasi-synthetic sequence derived from human genome
AFRKAKIRDRVSKLLASVILLPWPPKVLGLKNVTGRLLVGLRWW

SEQ ID NO: 36267 - protein, 44 aa, Artificial Sequence
  Quasi-synthetic sequence derived from human genome
PLRSKKAVWHKLLSKQRKRAVVACFRMAPLYNLPRHRSINLFLH

SEQ ID NO: 36268 - protein, 44 aa, Artificial Sequence
  Quasi-synthetic sequence derived from human genome
LRVLRMMRIFWVIKLARHFIGLQTLGLTLKRCYREMVMLLVFIC

SEQ ID NO: 36269 - protein, 44 aa, Artificial Sequence
  Quasi-synthetic sequence derived from human genome
KRCIVLVTELMTSGTLKTYLKRFKVMKPKVLRSWCRQILKGLLF

SEQ ID NO: 36270 - protein, 44 aa, Artificial Sequence
  Quasi-synthetic sequence derived from human genome
LVKRLHKVLRPFLLRRVKVDVEKQMPKKYEHVIRCRLSKRQRCL

SEQ ID NO: 36271 - protein, 44 aa, Artificial Sequence
  Quasi-synthetic sequence derived from human genome
IQKVLRGYRYRKEFLRQRRAAVTLQAWWRGYCNRRNFKLILVGF

SEQ ID NO: 36272 - protein, 44 aa, Artificial Sequence
  Quasi-synthetic sequence derived from human genome
IFPRLARHDRGNYVRLNMKQKHYVRGRALRSRLLRKQAWKQKWR

SEQ ID NO: 36273 - protein, 44 aa, Artificial Sequence
  Quasi-synthetic sequence derived from human genome
KIFKCYFKHTLQQKVFILFLTLWLLSLLKLLNVRRLFPQKDIYL

SEQ ID NO: 36274 - protein, 44 aa, Artificial Sequence
  Quasi-synthetic sequence derived from human genome
KKFYFHQHLCILKAKLGRPVTWNRQLRHFQGRKKALQIQKTWIK

SEQ ID NO: 36275 - protein, 44 aa, Artificial Sequence
  Quasi-synthetic sequence derived from human genome
YLNRKIVQVMRKQKTINRFLMRKRLLFPALVTLLISTLTFPPGF

SEQ ID NO: 36276 - protein, 44 aa, Artificial Sequence
  Quasi-synthetic sequence derived from human genome
KFFLYVCMYVCIREKILLYKTHWMTPIFLKVVINTRRIKHHFKI

SEQ ID NO: 36277 - protein, 44 aa, Artificial Sequence
  Quasi-synthetic sequence derived from human genome
RTFRLLRVLKLVRFMPALRRQLVVLMKTMDNVATFCMLLMLFIF

SEQ ID NO: 36278 - protein, 44 aa, Artificial Sequence
  Quasi-synthetic sequence derived from human genome
VLLLKKLKAWNDIKKVYASQRMRAGKGKMRNRRRIQRRGPCIIY

SEQ ID NO: 36279 - protein, 44 aa, Artificial Sequence
  Quasi-synthetic sequence derived from human genome
IIKIQAWARMWAARRQYLRRLHYFQKNVNSIVKIQAFFRARKAQ

SEQ ID NO: 36280 - protein, 44 aa, Artificial Sequence
  Quasi-synthetic sequence derived from human genome
KIFRFVAPLYYINKECFKSALYKQTVNPILIKVAWKKAAKRKIK

SEQ ID NO: 36281 - protein, 44 aa, Artificial Sequence
  Quasi-synthetic sequence derived from human genome
IKQIRARRKTARMLMIVLLVFAICYLPISILNVLKRVFGMFAHT

SEQ ID NO: 36282 - protein, 44 aa, Artificial Sequence
  Quasi-synthetic sequence derived from human genome
PTGFQKTRRWRGLGSLFRRACCVALPLQLLLLLFLLLLFLLPIR

SEQ ID NO: 36283 - protein, 44 aa, Artificial Sequence
  Quasi-synthetic sequence derived from human genome
SQIPKRKRKAKKRRKNDVVVVKGKLKLCSISGLIALCGILVLLV

SEQ ID NO: 36284 - protein, 44 aa, Artificial Sequence
  Quasi-synthetic sequence derived from human genome
LMFFNKDLRRNKAALLFWHILLLGPIVRCLHTIRNYHKWLKNLK

SEQ ID NO: 36285 - protein, 44 aa, Artificial Sequence
  Quasi-synthetic sequence derived from human genome
KRYPQPRGQKKKKVVKYGMGGMIIVLLICIVWFPLLFMSLIKSV

SEQ ID NO: 36286 - protein, 44 aa, Artificial Sequence
  Quasi-synthetic sequence derived from human genome
RFLGRHFPRFYVLYTIFMKGLQMLWADAKKARRIKTNMWKHNIK

SEQ ID NO: 36287 - protein, 44 aa, Artificial Sequence
  Quasi-synthetic sequence derived from human genome
ALARLGLPARPWPRWLGVAALGLAAVALGTVAWRRAWPRRRRRL

SEQ ID NO: 36288 - protein, 44 aa, Artificial Sequence
  Quasi-synthetic sequence derived from human genome
LRRAIVFTRQLVTYIVVGVTLRPAILVIPCLLLIKCHLKLYRTK

SEQ ID NO: 36289 - protein, 44 aa, Artificial Sequence
  Quasi-synthetic sequence derived from human genome
RRLRKNLKSFIIVHPSWFIRTILAVTRPFISSKFSSKIKYVNSL

SEQ ID NO: 36290 - protein, 44 aa, Artificial Sequence
  Quasi-synthetic sequence derived from human genome
GYLRIIRFLPLFKIIVPILIRIADVQIKKRLSLMYSITKGYIKS

SEQ ID NO: 36291 - protein, 44 aa, Artificial Sequence
  Quasi-synthetic sequence derived from human genome
HLLSPSKIKTFLSLVWKRRILFFVVTLVSVFLVWKFTYAHKYLL

SEQ ID NO: 36292 - protein, 44 aa, Artificial Sequence
  Quasi-synthetic sequence derived from human genome
TLKIVILGLVLPLLVMVICYSGILKTLLRCRNEKKRHRAVRLIF

SEQ ID NO: 36293 - protein, 44 aa, Artificial Sequence
  Quasi-synthetic sequence derived from human genome
MLYRFLARRTNSTFNQVVLKRLFMSRTNRPPLSLSRMIRKMKLP

SEQ ID NO: 36294 - protein, 44 aa, Artificial Sequence
  Quasi-synthetic sequence derived from human genome
LARKAFAKKQQQLSALKVLQRNCAAYLKLRHWQWWRVFTKVKPL

SEQ ID NO: 36295 - protein, 44 aa, Artificial Sequence
  Quasi-synthetic sequence derived from human genome
LKFHIRRFIFLFFILVIGIYPSGHSLILILGNPKLKQNAKKFLL

SEQ ID NO: 36296 - protein, 44 aa, Artificial Sequence
  Quasi-synthetic sequence derived from human genome
RKHLNKLRNIRYGFNTILVILIWRIFIARSQMARNIWYFVVSLC

SEQ ID NO: 36297 - protein, 44 aa, Artificial Sequence
  Quasi-synthetic sequence derived from human genome
LLSLKKNKIHSLPDKVFIKYTKLKKIFLQHNCIRHISRKAFFGL

SEQ ID NO: 36298 - protein, 44 aa, Artificial Sequence
  Quasi-synthetic sequence derived from human genome
KGKKCIVLVTELMTSGTLKTYLKRFKVMKIKVLRSWCRQILKGL

SEQ ID NO: 36299 - protein, 44 aa, Artificial Sequence
  Quasi-synthetic sequence derived from human genome
IFFAFVLLLSGALAYCLALQLYVRRRKKLPSVLLFKKPSPFIFI

SEQ ID NO: 36300 - protein, 44 aa, Artificial Sequence
  Quasi-synthetic sequence derived from human genome
WWRFLVIWILFSAVTAFVTFRATRKPLVQTTPRLVYKWFLLIYK

SEQ ID NO: 36301 - protein, 44 aa, Artificial Sequence
  Quasi-synthetic sequence derived from human genome
FRVAKKRAPKVLGTTLVVGLLAGVGYFAFMLFRKRLGSMILAFR

SEQ ID NO: 36302 - protein, 44 aa, Artificial Sequence
  Quasi-synthetic sequence derived from human genome
IVAAMRRIRYEFKAKNIKKKKVSIMVSVDGVKVILKKKKKKKEW

SEQ ID NO: 36303 - protein, 44 aa, Artificial Sequence
  Quasi-synthetic sequence derived from human genome
LRVKLTVRYKRVTTHRRIWLALGLCWLVSFLVGLTPMFGWNMKL

SEQ ID NO: 36304 - protein, 44 aa, Artificial Sequence
  Quasi-synthetic sequence derived from human genome
WWRLILSKILKKRRQAALEAFSRKEWAAVTLQSQARMWRIRRRY

SEQ ID NO: 36305 - protein, 44 aa, Artificial Sequence
  Quasi-synthetic sequence derived from human genome
TPPKPKLSKFILISSLAILLMVSLLLLSLWKLWRVKKFLIPSVP

SEQ ID NO: 36306 - protein, 44 aa, Artificial Sequence
  Quasi-synthetic sequence derived from human genome
SRYKFYLPPTFTLTLLVPCVVILAKALFLLPCISRRLARIRRGW

SEQ ID NO: 36307 - protein, 44 aa, Artificial Sequence
  Quasi-synthetic sequence derived from human genome
LARKAFAKRQQQLTAMKVLQRNCAAYLKLRNWQWWRLFTKVKPL

SEQ ID NO: 36308 - protein, 44 aa, Artificial Sequence
  Quasi-synthetic sequence derived from human genome
VRSALFALRYNILTLMRMLSLKSLKKQMKKVKKMTVKDMVTAFF

SEQ ID NO: 36309 - protein, 44 aa, Artificial Sequence
  Quasi-synthetic sequence derived from human genome
ALLRLLGLRRGLRRLRRLWAGPRVQRGRGRGRGRGWGPSRGCVP

SEQ ID NO: 36310 - protein, 44 aa, Artificial Sequence
  Quasi-synthetic sequence derived from human genome
STLHLVLRLRGGAKKRKKKSYTTPKKNKHKRKKVKLAVLKYYKV

SEQ ID NO: 36311 - protein, 44 aa, Artificial Sequence
  Quasi-synthetic sequence derived from human genome
SCPFCLKLLLPGLLLLLVVIILILAFWVLPKYKTRKAMRNNVPR

SEQ ID NO: 36312 - protein, 44 aa, Artificial Sequence
  Quasi-synthetic sequence derived from human genome
PITLGLLVAGVLVLLVSLGVAIHLCCRRRRARLRFMKQLRLHPL

SEQ ID NO: 36313 - protein, 44 aa, Artificial Sequence
  Quasi-synthetic sequence derived from human genome
RTIFLVLLFSQYARNVKFPLPIYKSKKGWTAYKLQLFKMFPIIL

SEQ ID NO: 36314 - protein, 44 aa, Artificial Sequence
  Quasi-synthetic sequence derived from human genome
GLFISVAFKLLILLLGSWALFFRRPKASLPRVFVLRALLMVLVF

SEQ ID NO: 36315 - protein, 44 aa, Artificial Sequence
  Quasi-synthetic sequence derived from human genome
RRKHWVVKLLTCMTIGFLFPMLSIAYLISPRSNLGLFIKKPFIK

SEQ ID NO: 36316 - protein, 44 aa, Artificial Sequence
  Quasi-synthetic sequence derived from human genome
LFKNKDHFQFTNLFLCGLLSKAKQKLLRHLVPAAALRRKRKALW

SEQ ID NO: 36317 - protein, 44 aa, Artificial Sequence
  Quasi-synthetic sequence derived from human genome
MWICQVCRPKKKGRKLLHEKAAQIKRRYAKPIGRPKNKLKQRLL

SEQ ID NO: 36318 - protein, 44 aa, Artificial Sequence
  Quasi-synthetic sequence derived from human genome
IFYLLKIANFSNLIFLRLKRRVKSVILVVLLGPLLFLACHLFVV

SEQ ID NO: 36319 - protein, 44 aa, Artificial Sequence
  Quasi-synthetic sequence derived from human genome
ILKRALKVKQAMMQLYVLKLLKVQTKYLGRQWRKSNMKTMSAIY

SEQ ID NO: 36320 - protein, 44 aa, Artificial Sequence
  Quasi-synthetic sequence derived from human genome
KLHFTCQRILFLKPSCMLEVITWPIQAFVKRKVIIFLKKCLLCK

SEQ ID NO: 36321 - protein, 44 aa, Artificial Sequence
  Quasi-synthetic sequence derived from human genome
ARKAFAKRQQQLTAMKVIQRNCAAYLKLRNWQWWRLFTKVKPLL

SEQ ID NO: 36322 - protein, 44 aa, Artificial Sequence
  Quasi-synthetic sequence derived from human genome
VRPRVFIKDMAPGKVVPMNCWGVYQAVRWLRWKASLIKLRALRR

SEQ ID NO: 36323 - protein, 44 aa, Artificial Sequence
  Quasi-synthetic sequence derived from human genome
AIFRLVQASGQKAPRPAARRKARRLLKTVLMILLAFLVCWGPLF

SEQ ID NO: 36324 - protein, 44 aa, Artificial Sequence
  Quasi-synthetic sequence derived from human genome
VLRVMRLMRIFRILKLARHSTGLRAFGFTLRQCYQQVGCLLLFI

SEQ ID NO: 36325 - protein, 44 aa, Artificial Sequence
  Quasi-synthetic sequence derived from human genome
KATGRKAPLWLRAKFQRLLFKLGCYIQKNCGKFLVVGLLIFGAF

SEQ ID NO: 36326 - protein, 44 aa, Artificial Sequence
  Quasi-synthetic sequence derived from human genome
FVMLAVSFLVAAICYFRRLHLYSGHKLKWWIGYLQRKFKRNLSV

SEQ ID NO: 36327 - protein, 44 aa, Artificial Sequence
  Quasi-synthetic sequence derived from human genome
AAFRRLKAHNLCRQIRAACVIQSYWRMRQDRVRFLNLKKTIIKF

SEQ ID NO: 36328 - protein, 44 aa, Artificial Sequence
  Quasi-synthetic sequence derived from human genome
KRRMSVGQQTWALLCKNCLKKWRMKRQTLLEWLFSFLLVLFLYL

SEQ ID NO: 36329 - protein, 44 aa, Artificial Sequence
  Quasi-synthetic sequence derived from human genome
KILRVLRVLRPLRAINRAKGLKHVVQCVFVAIRTIGNIVIVTTL

SEQ ID NO: 36330 - protein, 44 aa, Artificial Sequence
  Quasi-synthetic sequence derived from human genome
IWIRTKPSDIIRKYISKYSVFLRHRYQSRSAFLGRYLKKKKSVV

SEQ ID NO: 36331 - protein, 44 aa, Artificial Sequence
  Quasi-synthetic sequence derived from human genome
VIIIQARSKGFIQKRKFQEIKNSTIKIQAMWRRYRAKKYLCKVK

SEQ ID NO: 36332 - protein, 44 aa, Artificial Sequence
  Quasi-synthetic sequence derived from human genome
LKLHRVLKVFLSRTAQRIPYMTGGRVMRMLAVILLVVFWFLIGW

SEQ ID NO: 36333 - protein, 44 aa, Artificial Sequence
  Quasi-synthetic sequence derived from human genome
ERRRNTPFHERFFRFLLRKLYVFRRSFLMTCISLRNLILGRPSL

SEQ ID NO: 36334 - protein, 44 aa, Artificial Sequence
  Quasi-synthetic sequence derived from human genome
RRYIENIYHSKPMRWPFFLFIPFFIIFCVLIAIMVKVNFQRKKW

SEQ ID NO: 36335 - protein, 44 aa, Artificial Sequence
  Quasi-synthetic sequence derived from human genome
LRGKMMQRRPRSAEVKYFYFFKILLRLRLAILKYLFIDDKGILF

SEQ ID NO: 36336 - protein, 44 aa, Artificial Sequence
  Quasi-synthetic sequence derived from human genome
LGLFLLALLGLVVKRAVERRKALSRRARRLAVRMRALESSQRPR

SEQ ID NO: 36337 - protein, 44 aa, Artificial Sequence
  Quasi-synthetic sequence derived from human genome
RPRSGGRPGATGRRRRRLRRRPRGLRCSRLPPPPPLPLLLGLLL

SEQ ID NO: 36338 - protein, 44 aa, Artificial Sequence
  Quasi-synthetic sequence derived from human genome
LQMVLQRRKFLQMKRRKYGFIYKTHLFGRPTVRVMGADNVRRIL

SEQ ID NO: 36339 - protein, 44 aa, Artificial Sequence
  Quasi-synthetic sequence derived from human genome
LVVVTWRVCQKSHCFRLGRQLSKALQVNCVVRKLLVQLRRLYWW

SEQ ID NO: 36340 - protein, 44 aa, Artificial Sequence
  Quasi-synthetic sequence derived from human genome
KPKLSKFILISSLAILLMVSLLLLSLWKLWRVKKFLIPSVPDPK

SEQ ID NO: 36341 - protein, 44 aa, Artificial Sequence
  Quasi-synthetic sequence derived from human genome
LLLWKNVTLKRRSPWVLAFEIFIPLVLFFILLGLRQKKPTISVK

SEQ ID NO: 36342 - protein, 44 aa, Artificial Sequence
  Quasi-synthetic sequence derived from human genome
LLKKRAAFTKLRRAAILRRERQQKAPRHPLADILHRGCPLLRRW

SEQ ID NO: 36343 - protein, 44 aa, Artificial Sequence
  Quasi-synthetic sequence derived from human genome
LLAACILNFQRALALFVITCLVIFVLVHSFLKKLLGKKLTRCLK

SEQ ID NO: 36344 - protein, 44 aa, Artificial Sequence
  Quasi-synthetic sequence derived from human genome
VPLLVLALASYRRLCLRLRLADCLVPYSRALYRRRRAPQPRQIR

SEQ ID NO: 36345 - protein, 44 aa, Artificial Sequence
  Quasi-synthetic sequence derived from human genome
CARRARGRWEGSAPRRLLLALHRRLRGLRRAAAGTSRLLFQRLL

SEQ ID NO: 36346 - protein, 44 aa, Artificial Sequence
  Quasi-synthetic sequence derived from human genome
GPKSVWYRIAFWLQWFNSFVNPLLYPLCHKRFQKAFLKIFCIKK

SEQ ID NO: 36347 - protein, 44 aa, Artificial Sequence
  Quasi-synthetic sequence derived from human genome
ARLRPRLHFCLVLLLLLVVPAAWGCGPGRVVGSRRRPPRKLVPL

SEQ ID NO: 36348 - protein, 44 aa, Artificial Sequence
  Quasi-synthetic sequence derived from human genome
IFVAIFWIVFLLLIVFYTAITKKIFKSHLKSSRNSTSVKKKSSR

SEQ ID NO: 36349 - protein, 44 aa, Artificial Sequence
  Quasi-synthetic sequence derived from human genome
VARLWGIRKCKPHMNYDKLSRALRYYYNKRILHKTKGKRFTYKF

SEQ ID NO: 36350 - protein, 44 aa, Artificial Sequence
  Quasi-synthetic sequence derived from human genome
IFMVKIFMLLVVGITSGMWIWTSKTLQSWQQVCSRRLKKKSRRK

SEQ ID NO: 36351 - protein, 44 aa, Artificial Sequence
  Quasi-synthetic sequence derived from human genome
HKGRLKHRGSSLHPFRKGLQEKDKVWLLREQKRKKKLRKLLKRL

SEQ ID NO: 36352 - protein, 44 aa, Artificial Sequence
  Quasi-synthetic sequence derived from human genome
FALRMKIKEVKKENGDKKIVPKKKKPLKLGPIKKKDLKKLVLYL

SEQ ID NO: 36353 - protein, 44 aa, Artificial Sequence
  Quasi-synthetic sequence derived from human genome
LSSKAAKDVLGFLRVVRFVRILRIFKLTRHFVGLRVLGHTLRAS

SEQ ID NO: 36354 - protein, 44 aa, Artificial Sequence
  Quasi-synthetic sequence derived from human genome
KVLCERGNSLMNNRTGRRKSWRLEFLFLRRRCFLLTFYLWFLFF

SEQ ID NO: 36355 - protein, 44 aa, Artificial Sequence
  Quasi-synthetic sequence derived from human genome
ILRFPVFLAILINFFIFVRIVQLLVAKLRARQMHHTDYKFRLAK

SEQ ID NO: 36356 - protein, 44 aa, Artificial Sequence
  Quasi-synthetic sequence derived from human genome
ARNVKFPLPIYKSKKGWTAYKLQLFKMFPIILAILVSWLLCFIF

SEQ ID NO: 36357 - protein, 44 aa, Artificial Sequence
  Quasi-synthetic sequence derived from human genome
GWRFIRVFIKTIRRDIFGGLVLLKVKAKVRQCLQERRTVPILFA

SEQ ID NO: 36358 - protein, 44 aa, Artificial Sequence
  Quasi-synthetic sequence derived from human genome
LFLLILLTGVLCHRFHGLWYMKMMWAWLQAKRKPRKAPSRNICY

SEQ ID NO: 36359 - protein, 44 aa, Artificial Sequence
  Quasi-synthetic sequence derived from human genome
LGRHLGVVIGILVAVVLLLLLLLLLFLILRHRRQGKHWTSTQRK

SEQ ID NO: 36360 - protein, 44 aa, Artificial Sequence
  Quasi-synthetic sequence derived from human genome
WWRMTLSRVLEKKRQAALIAYATRERAVIKLQSLVRMWRVRWRY

SEQ ID NO: 36361 - protein, 44 aa, Artificial Sequence
  Quasi-synthetic sequence derived from human genome
FLKLKNAATLIQRHWRGHNCRKNYGLMRLGFLRLQALHRSRKLH

SEQ ID NO: 36362 - protein, 44 aa, Artificial Sequence
  Quasi-synthetic sequence derived from human genome
FQGCLYLIYNLLQAVFFVLFVLSVHYLWKKWKKHQKKLKKQASL

SEQ ID NO: 36363 - protein, 44 aa, Artificial Sequence
  Quasi-synthetic sequence derived from human genome
KLSKRQLFFRKKLLHSSQMLRAVSLGQDRYRRRYWVLPYLAGIF

SEQ ID NO: 36364 - protein, 44 aa, Artificial Sequence
  Quasi-synthetic sequence derived from human genome
LKLNLFGLVLPLLVMIICYTGIIKILLRRPNEKKSKAVRLIFVI

SEQ ID NO: 36365 - protein, 44 aa, Artificial Sequence
  Quasi-synthetic sequence derived from human genome
LKSVQLFSKKFKLWLLNALEGVPALLQISKLKEVTLFVKRLRRK

SEQ ID NO: 36366 - protein, 44 aa, Artificial Sequence
  Quasi-synthetic sequence derived from human genome
GKLIRMGPQERWLLRTKRLHWSRLLFLLGMLIIGSTYQHLRRPR

SEQ ID NO: 36367 - protein, 44 aa, Artificial Sequence
  Quasi-synthetic sequence derived from human genome
ILKMVGPGFLSLGLMMLVCGLVWVPIIKKKQKHRQKSNFLRSLK

SEQ ID NO: 36368 - protein, 44 aa, Artificial Sequence
  Quasi-synthetic sequence derived from human genome
IAGPGLLIGLLYARLARAYRRSQRASFKRARRPGARALRLVLGI

SEQ ID NO: 36369 - protein, 44 aa, Artificial Sequence
  Quasi-synthetic sequence derived from human genome
KRRERAVAIVRLVLGFLWPLLTLTICYTFILLRTWSRRATRSTK

SEQ ID NO: 36370 - protein, 44 aa, Artificial Sequence
  Quasi-synthetic sequence derived from human genome
KNRPRRRFLCHLSRQQLRMAMRIPVLYEQLKREKLRVHKARQWK

SEQ ID NO: 36371 - protein, 44 aa, Artificial Sequence
  Quasi-synthetic sequence derived from human genome
NPHLLTLFHRLCKLLFFRIRPIFVFDGDAPLLKKQTLVKRRQRK

SEQ ID NO: 36372 - protein, 44 aa, Artificial Sequence
  Quasi-synthetic sequence derived from human genome
FVFHRLKIKQILPTIYKRKNLSLFLSISLLIFWGSSLLGARLYW

SEQ ID NO: 36373 - protein, 44 aa, Artificial Sequence
  Quasi-synthetic sequence derived from human genome
RASPLTSIISAVVGILLVVVLGVVFGILIKRRQQKIRKYTMRRL

SEQ ID NO: 36374 - protein, 44 aa, Artificial Sequence
  Quasi-synthetic sequence derived from human genome
TFKIKQFLAKKQKQNRPIPQWIRMKTGNKIRYNSKRRHWKRTKL

SEQ ID NO: 36375 - protein, 44 aa, Artificial Sequence
  Quasi-synthetic sequence derived from human genome
LVRGWLVRKRFLEQRAKIRLLHFTAAAYYHLNAVRIQRAYKLYL

SEQ ID NO: 36376 - protein, 44 aa, Artificial Sequence
  Quasi-synthetic sequence derived from human genome
IRASAVGLLGTLVRRGRGGLRLGLRGPLRKLVLQSLVPLLLRLH

SEQ ID NO: 36377 - protein, 44 aa, Artificial Sequence
  Quasi-synthetic sequence derived from human genome
KTFLSYARTSIRASLTFNRGFKAGRNMRRKLFGVLRLKCHSLFL

SEQ ID NO: 36378 - protein, 44 aa, Artificial Sequence
  Quasi-synthetic sequence derived from human genome
LRRGRPKRRRKPQPHSGSVLALPLRSRKIRKQLRSVVSRMAALR

SEQ ID NO: 36379 - protein, 44 aa, Artificial Sequence
  Quasi-synthetic sequence derived from human genome
KLKYLAFLRKRMNTNPSRGPYHFRAPSRIFWRTVRGMLPHKTKR

SEQ ID NO: 36380 - protein, 44 aa, Artificial Sequence
  Quasi-synthetic sequence derived from human genome
LRQRQMDRHAKIKRAITFIMVVAIVFVICFLPSVVVRIRIFWLL

SEQ ID NO: 36381 - protein, 44 aa, Artificial Sequence
  Quasi-synthetic sequence derived from human genome
RLWGRRKCKPQMNYDKLSRALRYYYNKRILHKTKGKRFTYKFNF

SEQ ID NO: 36382 - protein, 44 aa, Artificial Sequence
  Quasi-synthetic sequence derived from human genome
LLLVLVLVLLVSPRGCRARRGLRGLLMAHSQRLLFRIGYSLYTR

SEQ ID NO: 36383 - protein, 44 aa, Artificial Sequence
  Quasi-synthetic sequence derived from human genome
VYKLFSLQDLLLLVRCSVQRIETRPRSKKRKKIRRQFPVYVLPK

SEQ ID NO: 36384 - protein, 44 aa, Artificial Sequence
  Quasi-synthetic sequence derived from human genome
YIYFIHSLCLLGRLLIYKQGRKLFPIKLKNKKGLVSLIDLLVLF

SEQ ID NO: 36385 - protein, 44 aa, Artificial Sequence
  Quasi-synthetic sequence derived from human genome
LFALLSRGRRRRMHVLRRRWDLGSLCRALLTRGLAALGHSLKHV

SEQ ID NO: 36386 - protein, 44 aa, Artificial Sequence
  Quasi-synthetic sequence derived from human genome
RSFRRHIRQHSALTRLRLRNVFRRFLRDFQPGRLSQQMVMVKYL

SEQ ID NO: 36387 - protein, 44 aa, Artificial Sequence
  Quasi-synthetic sequence derived from human genome
SLSQIKFSPVAKKLFVVTAVSAISVIFLAHHFKRKRGKKKGKIL

SEQ ID NO: 36388 - protein, 44 aa, Artificial Sequence
  Quasi-synthetic sequence derived from human genome
YLLIIRSLRQGLRVEKRLKTKAVRMIAIVLAIFLVCFVPYHVNR

SEQ ID NO: 36389 - protein, 44 aa, Artificial Sequence
  Quasi-synthetic sequence derived from human genome
FLKTASFFVRLGPMALAFKVRGLLDCKHSWKRLKDIRKIFPGKK

SEQ ID NO: 36390 - protein, 44 aa, Artificial Sequence
  Quasi-synthetic sequence derived from human genome
IIRIMRVLRIARVLKLLKMAVGMRALLDTVGNLGLLFMLLFFIF

SEQ ID NO: 36391 - protein, 44 aa, Artificial Sequence
  Quasi-synthetic sequence derived from human genome
KHFEKKKDIRRGIGYLKLICFLIPFLLSLKKKMKVPYLSSLLQP

SEQ ID NO: 36392 - protein, 44 aa, Artificial Sequence
  Quasi-synthetic sequence derived from human genome
SKRRKSNPKPLVLSEARKQLMIYRLPQVLRLHLKRFRWSGRNHR

SEQ ID NO: 36393 - protein, 44 aa, Artificial Sequence
  Quasi-synthetic sequence derived from human genome
RRELSLGRKKAPHRLCGRFSRISMKLPRIPLRRQKLPKVVVAHH

SEQ ID NO: 36394 - protein, 44 aa, Artificial Sequence
  Quasi-synthetic sequence derived from human genome
AKVAARMVWRLLHGQVLTRRERRRLLRTCVDFFRLVPFMVFLIV

SEQ ID NO: 36395 - protein, 44 aa, Artificial Sequence
  Quasi-synthetic sequence derived from human genome
LPAKASRSKTRLKSQLLLQKYIAQRKWKKHFYVVTAANRLRKFP

SEQ ID NO: 36396 - protein, 44 aa, Artificial Sequence
  Quasi-synthetic sequence derived from human genome
LPLLIMVICYSGILKTLLRCRNEKKRHRAVRVIFTIMIVYFLFW

SEQ ID NO: 36397 - protein, 44 aa, Artificial Sequence
  Quasi-synthetic sequence derived from human genome
KLVFLPLRLVWKEVILRKILILVLVQKDVSLTTQYFLQKARSRR

SEQ ID NO: 36398 - protein, 44 aa, Artificial Sequence
  Quasi-synthetic sequence derived from human genome
FLQMAVYRRRFVQQKRAAITLQHYFRTWQTRKQFLLYRKAAVVL

SEQ ID NO: 36399 - protein, 44 aa, Artificial Sequence
  Quasi-synthetic sequence derived from human genome
LALILSSIFGLLLLVLFILFLTWCRVQKQKHLPLRVSTRRRGSL

SEQ ID NO: 36400 - protein, 44 aa, Artificial Sequence
  Quasi-synthetic sequence derived from human genome
NLAKLKLFRHYYVLIVCYIYFTRIIAFLLKLAVPFQWKWLYQLL

SEQ ID NO: 36401 - protein, 44 aa, Artificial Sequence
  Quasi-synthetic sequence derived from human genome
VFGVRTSVSVIIALRRAVKRHRERRERQKRVFRMSLLIISTFLL

SEQ ID NO: 36402 - protein, 44 aa, Artificial Sequence
  Quasi-synthetic sequence derived from human genome
KVKFDQKKRVKLAQGLWLMNWFSVLAGIIIFSLGLFLKIELRKR

SEQ ID NO: 36403 - protein, 44 aa, Artificial Sequence
  Quasi-synthetic sequence derived from human genome
IYAVATLRFLKLRRERRALLCLLLVLGIAFIPIILEKIMYKVTR

SEQ ID NO: 36404 - protein, 44 aa, Artificial Sequence
  Quasi-synthetic sequence derived from human genome
RAVLDVANHFSRLKIHFTKVFSAFALVRTIRYLYRRLQRMLGLR

SEQ ID NO: 36405 - protein, 44 aa, Artificial Sequence
  Quasi-synthetic sequence derived from human genome
AAVKIQAWWRGTLVRRTLLHAALRAWIIQCWWRMTLSRVLEKKR

SEQ ID NO: 36406 - protein, 44 aa, Artificial Sequence
  Quasi-synthetic sequence derived from human genome
RFSCTQIWVKMYGYFAGLCRRLQKFWRVTVKGFFVKKKEKKIPS

SEQ ID NO: 36407 - protein, 44 aa, Artificial Sequence
  Quasi-synthetic sequence derived from human genome
WRRYGKLSRHLMKVKLKKYTKFLFVRDPFVRLISAFRSKFELEN

SEQ ID NO: 36408 - protein, 44 aa, Artificial Sequence
  Quasi-synthetic sequence derived from human genome
VGVLLFSKLVLKLPWTQVGFSLLFLYLGSGGWRFIRVFIKTIRR

SEQ ID NO: 36409 - protein, 44 aa, Artificial Sequence
  Quasi-synthetic sequence derived from human genome
VKPKIPKGVSRKLDRLAYIAHPKLGKRARARIAKGLRLCRPKAK

SEQ ID NO: 36410 - protein, 44 aa, Artificial Sequence
  Quasi-synthetic sequence derived from human genome
RKLLIQAAIVRIMKMRKVLKHQQLLGEVLTQLSSRFKPRVPVIK

SEQ ID NO: 36411 - protein, 44 aa, Artificial Sequence
  Quasi-synthetic sequence derived from human genome
YTIAVVVFHFLVPMIIVIFCYLRIWILVLQVRQRVKPDRKPKLK

SEQ ID NO: 36412 - protein, 44 aa, Artificial Sequence
  Quasi-synthetic sequence derived from human genome
RENVLVKRKRTKGKKLLLSIGVLLHKWKNVCIVLTALNFPSILL

SEQ ID NO: 36413 - protein, 44 aa, Artificial Sequence
  Quasi-synthetic sequence derived from human genome
SLFTAALWGALAALFCLQYLGVRVLLRFQRKLSVLLLLLGRRRV

SEQ ID NO: 36414 - protein, 44 aa, Artificial Sequence
  Quasi-synthetic sequence derived from human genome
IILKLYRVLQLFLSRTAQRSALLSSGRLLRRLGLLLLPVLGFLA

SEQ ID NO: 36415 - protein, 44 aa, Artificial Sequence
  Quasi-synthetic sequence derived from human genome
VLLSLLLILKAGRRWNKYFKSRRPLFTGGLIGGLFTYVLFWTFL

SEQ ID NO: 36416 - protein, 44 aa, Artificial Sequence
  Quasi-synthetic sequence derived from human genome
LRVKRSVTRIKKRSRSVFYRLTILILVFAVSWMPLHLFHVVTDF

SEQ ID NO: 36417 - protein, 44 aa, Artificial Sequence
  Quasi-synthetic sequence derived from human genome
TIVSQRKQIKRKAPRGFLKRVFKRKKPQLRLEKSGDLLVRFHPF

SEQ ID NO: 36418 - protein, 44 aa, Artificial Sequence
  Quasi-synthetic sequence derived from human genome
LKPVQKLFAIIVGRGIRKWWQALPPNKKEVVKENIRKNKWKLFL

SEQ ID NO: 36419 - protein, 44 aa, Artificial Sequence
  Quasi-synthetic sequence derived from human genome
KIIRTIFKRLKSFICPKLHMGFKSSLRSQLSKYTAKIVNIVLCA

SEQ ID NO: 36420 - protein, 44 aa, Artificial Sequence
  Quasi-synthetic sequence derived from human genome
LRPKHWFQLCRPMNPRARKNCSQIALFQKRRFQFFCSMRCRAWV

SEQ ID NO: 36421 - protein, 44 aa, Artificial Sequence
  Quasi-synthetic sequence derived from human genome
MMAQILRSHLIKATVIPNRVKMLPYFGIIRNRMMSTHKSKKKIR

SEQ ID NO: 36422 - protein, 44 aa, Artificial Sequence
  Quasi-synthetic sequence derived from human genome
LKKKLFKRRRVLNRERRLRHRVVGAVIDQGLITRHHLKKRASSA

SEQ ID NO: 36423 - protein, 44 aa, Artificial Sequence
  Quasi-synthetic sequence derived from human genome
SRFKRSYNYKTIVKKILAKLKRARSKKLDNFQSEKKVFKKSFLR

SEQ ID NO: 36424 - protein, 44 aa, Artificial Sequence
  Quasi-synthetic sequence derived from human genome
KMAGVIAGLLMFIIILLGVMLTIKRRRNAYSYSYYLSQRKLAKK

SEQ ID NO: 36425 - protein, 44 aa, Artificial Sequence
  Quasi-synthetic sequence derived from human genome
LRLQIIQRERRRKELFRKKNKAAAVIQRAWRSYQLRKHLSHLRH

SEQ ID NO: 36426 - protein, 44 aa, Artificial Sequence
  Quasi-synthetic sequence derived from human genome
RAKLLREGWVHANRPKRLLLVLVSAFFIFWSPFNVVLLVHLWRR

SEQ ID NO: 36427 - protein, 44 aa, Artificial Sequence
  Quasi-synthetic sequence derived from human genome
WSVLYVIIATFVIVVALGILSWTVICCCKRQKGKPKRKSKYKIL

SEQ ID NO: 36428 - protein, 44 aa, Artificial Sequence
  Quasi-synthetic sequence derived from human genome
VTANPWNTIALLCGAFLALFKAAEFAKLSIKWMIKIRKRYLKRR

SEQ ID NO: 36429 - protein, 44 aa, Artificial Sequence
  Quasi-synthetic sequence derived from human genome
VALLWKRLLIARRSRKGFFAQIVLPAVFVCIALVFSLIVPPFGK

SEQ ID NO: 36430 - protein, 44 aa, Artificial Sequence
  Quasi-synthetic sequence derived from human genome
LLIVVKVRSAGRRVWAPSCQRRRRSERRVTRMVVAVVALFVLCW

SEQ ID NO: 36431 - protein, 44 aa, Artificial Sequence
  Quasi-synthetic sequence derived from human genome
LNKIIQFIRHWRQWNRIFRWKCHDIVKSKVFYWLVILIVALNTL

SEQ ID NO: 36432 - protein, 44 aa, Artificial Sequence
  Quasi-synthetic sequence derived from human genome
LQLFYLSASINPILYNLISKKYRAAAFKLLLARKSRPRGFHRSR

SEQ ID NO: 36433 - protein, 44 aa, Artificial Sequence
  Quasi-synthetic sequence derived from human genome
FWKHFLTLKMNISVLVLPLFIFTFLYVQMRKTLRFREQRYSLFK

SEQ ID NO: 36434 - protein, 44 aa, Artificial Sequence
  Quasi-synthetic sequence derived from human genome
LLLQGLFIVLILVGYISVKVMLKSIKTRLGRRVPAAPPALRRNL

SEQ ID NO: 36435 - protein, 44 aa, Artificial Sequence
  Quasi-synthetic sequence derived from human genome
AILLVVAVFCILWNWNKRKKRQVPYLRVTVMPLLTLPQTRQRAK

SEQ ID NO: 36436 - protein, 44 aa, Artificial Sequence
  Quasi-synthetic sequence derived from human genome
VLRQLALLLWKNYTLQKRKVLVTVLELFLPLLFSGILIWLRLKI

SEQ ID NO: 36437 - protein, 44 aa, Artificial Sequence
  Quasi-synthetic sequence derived from human genome
LLVMLPTWWIVSSWLVWGVILFVYLVIRALRLWRTAKLQVTLKK

SEQ ID NO: 36438 - protein, 44 aa, Artificial Sequence
  Quasi-synthetic sequence derived from human genome
LVLQSMWKGKTLRRQLQRQHKCAIIIQSYYRMHVQQKKWKIMKK

SEQ ID NO: 36439 - protein, 44 aa, Artificial Sequence
  Quasi-synthetic sequence derived from human genome
HILQIRKLRHRLSNFPRLPGILAPETVLLPFCYKVFRKKEKVKR

SEQ ID NO: 36440 - protein, 44 aa, Artificial Sequence
  Quasi-synthetic sequence derived from human genome
MKKQRKILWRKGIHLAFSEKWNTGFGGFKKFYFHQHLCILKAKL

SEQ ID NO: 36441 - protein, 44 aa, Artificial Sequence
  Quasi-synthetic sequence derived from human genome
RKRLRCRRKTVLVLMCILTAYVLCWAPFYGFTIVRDFFPTVFVK

SEQ ID NO: 36442 - protein, 44 aa, Artificial Sequence
  Quasi-synthetic sequence derived from human genome
RYLQRLLLVHGRWSYIRMCKFLRYFFYKNFAFTLVHFWYSFFNG

SEQ ID NO: 36443 - protein, 44 aa, Artificial Sequence
  Quasi-synthetic sequence derived from human genome
KLDRTAFKKTVNIPVLKVRKEIVSKLMRSLKRAALQRPGIRRVI

SEQ ID NO: 36444 - protein, 44 aa, Artificial Sequence
  Quasi-synthetic sequence derived from human genome
LKWKIFTNFKMNILGLLIPFTIFMFCYIKILHQLKRCQNHNKTK

SEQ ID NO: 36445 - protein, 44 aa, Artificial Sequence
  Quasi-synthetic sequence derived from human genome
RKRFFALPYVDHFLRLEREKRARIKARKENLERKKAKILLKKFP

SEQ ID NO: 36446 - protein, 44 aa, Artificial Sequence
  Quasi-synthetic sequence derived from human genome
ITIQAGVRGYLARRRIRLWHRGAMVIQATWRGYRVRRNLAHLCR

SEQ ID NO: 36447 - protein, 44 aa, Artificial Sequence
  Quasi-synthetic sequence derived from human genome
RWHWQKKVINKGLFFLGSLIAISSTYLLIHYMSPRSFLRLRRPW

SEQ ID NO: 36448 - protein, 44 aa, Artificial Sequence
  Quasi-synthetic sequence derived from human genome
RRRRRGRTDGRRFLLRRAVPGHLGLARARVERAWLAAGLLKVPL

SEQ ID NO: 36449 - protein, 44 aa, Artificial Sequence
  Quasi-synthetic sequence derived from human genome
IRAIRNFHTSPRFQAAPVPLLLMILKPVQKLFAIIVGRGIRKWW

SEQ ID NO: 36450 - protein, 44 aa, Artificial Sequence
  Quasi-synthetic sequence derived from human genome
LCTLRGRRCHCLPFPKRGMQRWMLPLRRGARLLPLASSKNPRAR

SEQ ID NO: 36451 - protein, 44 aa, Artificial Sequence
  Quasi-synthetic sequence derived from human genome
LLIVGKMRAVALRAGWQQRRRSEKKITRLVLMVVVVFVLCWMPF

SEQ ID NO: 36452 - protein, 44 aa, Artificial Sequence
  Quasi-synthetic sequence derived from human genome
KRKKKAWKRMVTKVCFVGDGFTRKPPKYERFIRPMGLRFKKAHV

SEQ ID NO: 36453 - protein, 44 aa, Artificial Sequence
  Quasi-synthetic sequence derived from human genome
RLLFRIGYSLYTRTWLGYLFYRQQLRRARNRYPKGHSKTQPRLF

SEQ ID NO: 36454 - protein, 44 aa, Artificial Sequence
  Quasi-synthetic sequence derived from human genome
RQAWKSWLIYVVVRRTKLQMQTTALEFRQRIILRVWWSTWRQRL

SEQ ID NO: 36455 - protein, 44 aa, Artificial Sequence
  Quasi-synthetic sequence derived from human genome
VRKYLLRLDVRKDHVKFWRPQLLLLVGNPRGALPLLRLANQLKK

SEQ ID NO: 36456 - protein, 44 aa, Artificial Sequence
  Quasi-synthetic sequence derived from human genome
WPRPPPRRFSPPRRMLPPPPMWRRSPPRMRRRSRSPRRRSPVRR

SEQ ID NO: 36457 - protein, 44 aa, Artificial Sequence
  Quasi-synthetic sequence derived from human genome
LLRLRLAILKYLFIDDKGILFVSSRKHLPTLPTLLSRLKLFLVK

SEQ ID NO: 36458 - protein, 44 aa, Artificial Sequence
  Quasi-synthetic sequence derived from human genome
ALWELYRELGLFQGPALGLRNHLGRKLRRRKKKKAKRTTNWKII

SEQ ID NO: 36459 - protein, 44 aa, Artificial Sequence
  Quasi-synthetic sequence derived from human genome
RVKAAPGPKAALAVIRGGATRAAGVFYPWRFRLLCLLRRWLPRP

SEQ ID NO: 36460 - protein, 44 aa, Artificial Sequence
  Quasi-synthetic sequence derived from human genome
CILVGVLLLFVLLLVVRRRRREQRLKRLRDAKSLAEMLMSKNTR

SEQ ID NO: 36461 - protein, 44 aa, Artificial Sequence
  Quasi-synthetic sequence derived from human genome
HGKRLFVIRPSRFYDRRFLKLLRFYIALTGIPVAIFITLVNVFI

SEQ ID NO: 36462 - protein, 44 aa, Artificial Sequence
  Quasi-synthetic sequence derived from human genome
RLLLKWRGSIYKLLYREFIVFAVLYTAISLVYRLLLTGVQKRYF

SEQ ID NO: 36463 - protein, 44 aa, Artificial Sequence
  Quasi-synthetic sequence derived from human genome
KPVFMFCKAIRFSYPSIHPFILIWGNKKLKQTFLSVLRQVRYWV

SEQ ID NO: 36464 - protein, 44 aa, Artificial Sequence
  Quasi-synthetic sequence derived from human genome
VLGRALPTSRLDLACSLSWNVIRYSLQKLRLVRWLLKKVFQCRR

SEQ ID NO: 36465 - protein, 44 aa, Artificial Sequence
  Quasi-synthetic sequence derived from human genome
FRVYLHLRQTWLAFMIILSILEVIIILLLIFLRKRILIAIALIK

SEQ ID NO: 36466 - protein, 44 aa, Artificial Sequence
  Quasi-synthetic sequence derived from human genome
CAVRAMLYSRAVRNLKKKLLPWQRRGLLRAQGLRGWKARRATTG

SEQ ID NO: 36467 - protein, 44 aa, Artificial Sequence
  Quasi-synthetic sequence derived from human genome
AKPAHIAKVKMKFRFLGKLMAKAIMDFRLVDLPLGLPFYKWMLR

SEQ ID NO: 36468 - protein, 44 aa, Artificial Sequence
  Quasi-synthetic sequence derived from human genome
KYLRKSLKIIYLNSIQELEIRNMSWPRLIRKLRCYLKEMKNLRK

SEQ ID NO: 36469 - protein, 44 aa, Artificial Sequence
  Quasi-synthetic sequence derived from human genome
LYWKAQRYRLIREFHSRPALAPPFIVISHLRLLLRQLCRRPRSP

SEQ ID NO: 36470 - protein, 44 aa, Artificial Sequence
  Quasi-synthetic sequence derived from human genome
GPLIPKKFQLNQHRRIKLSPLMMYEKLSMIRFRYRILRSQHFRT

SEQ ID NO: 36471 - protein, 44 aa, Artificial Sequence
  Quasi-synthetic sequence derived from human genome
AIIIQKHCRGYLVRSLYQLIRMATITMQAYSRGFLARRRYRKML

SEQ ID NO: 36472 - protein, 44 aa, Artificial Sequence
  Quasi-synthetic sequence derived from human genome
TFTIKRFLAKKQKQNRPIPQWIQMKPGSKIRYNSKRRHWRRTKL

SEQ ID NO: 36473 - protein, 44 aa, Artificial Sequence
  Quasi-synthetic sequence derived from human genome
FQQFSSLTNLPLRKLKFSPIKYGYQPRRNFWPARLATRLLKLRY

SEQ ID NO: 36474 - protein, 44 aa, Artificial Sequence
  Quasi-synthetic sequence derived from human genome
LKAKRKVVKMMIIVVMTFAICWLPYHIYFILTAIYQQLNRWKYI

SEQ ID NO: 36475 - protein, 44 aa, Artificial Sequence
  Quasi-synthetic sequence derived from human genome
KATGKLYACKKLNKKRLKKRKGYQGAMVEKKILMKVHSRFIVSL

SEQ ID NO: 36476 - protein, 44 aa, Artificial Sequence
  Quasi-synthetic sequence derived from human genome
ARIGRILRLVRAARGIRTLLFALMMSLPSLFNIGLLLFLIMFIY

SEQ ID NO: 36477 - protein, 44 aa, Artificial Sequence
  Quasi-synthetic sequence derived from human genome
LLPLLLLLPLLLLKLHLWPQLRWLPADLAFAVRALCCKRALRAR

SEQ ID NO: 36478 - protein, 44 aa, Artificial Sequence
  Quasi-synthetic sequence derived from human genome
VKKLPGVMLFKKKKTRKLKIALALSDLVIYTKAEKFKSFQHSRL

SEQ ID NO: 36479 - protein, 44 aa, Artificial Sequence
  Quasi-synthetic sequence derived from human genome
KLKRNMMPWALQKKREIHMAKAHRRRAARSALPMRLTSCIFRRP

SEQ ID NO: 36480 - protein, 44 aa, Artificial Sequence
  Quasi-synthetic sequence derived from human genome
ARKKYRFHKTRSHVTHRTPKVKKSPKVRKKSYLSRLMLANRLPF

SEQ ID NO: 36481 - protein, 44 aa, Artificial Sequence
  Quasi-synthetic sequence derived from human genome
FWFVLKVVLIIIRLKKYEKRGELVTVLDKFLSHAKRQPRKPFII

SEQ ID NO: 36482 - protein, 44 aa, Artificial Sequence
  Quasi-synthetic sequence derived from human genome
RGRRRTRAAGSLLSRAAILLFISAFLVRVPSSVGHLVRLPRAFR

SEQ ID NO: 36483 - protein, 44 aa, Artificial Sequence
  Quasi-synthetic sequence derived from human genome
FLRRPGAPASWIWWRMLRQVLRRGLQSFCHRLGLCVSRHPVFFL

SEQ ID NO: 36484 - protein, 44 aa, Artificial Sequence
  Quasi-synthetic sequence derived from human genome
LRTLRAVRVLRPLKLVSGIPSLQIVLKSIMKAMVPLLQIGLLLF

SEQ ID NO: 36485 - protein, 44 aa, Artificial Sequence
  Quasi-synthetic sequence derived from human genome
LAAGTVASIILALVLLVVLLVVCGPLAYKKLVKKFRQKKQRQWI

SEQ ID NO: 36486 - protein, 44 aa, Artificial Sequence
  Quasi-synthetic sequence derived from human genome
LKNRSLKLQKMKYRPPKTKFFFTVIPQPIFLSPGITLTLPIVFR

SEQ ID NO: 36487 - protein, 44 aa, Artificial Sequence
  Quasi-synthetic sequence derived from human genome
VFIYVQLWLVLRYRHKRLSYQSVFLFLCLFWASLRTVLFSFYFK

SEQ ID NO: 36488 - protein, 44 aa, Artificial Sequence
  Quasi-synthetic sequence derived from human genome
LLIPYLLGRKRRWSKCKIRVFVGGQINRMDQERKAIISLLSKFR

SEQ ID NO: 36489 - protein, 44 aa, Artificial Sequence
  Quasi-synthetic sequence derived from human genome
KAINGKYHRFLGRHFPRFYVLYTIFMKGLQMLWADAKKARRIKT

SEQ ID NO: 36490 - protein, 44 aa, Artificial Sequence
  Quasi-synthetic sequence derived from human genome
KRARLVRVHAYIISYLKKEMPSVFGKENKKKQLILKLPVIFAKI

SEQ ID NO: 36491 - protein, 44 aa, Artificial Sequence
  Quasi-synthetic sequence derived from human genome
KLLTLQPPGMLWLMERGGLGKPRGPRHRGLLRVRLGRFISRLLL

SEQ ID NO: 36492 - protein, 44 aa, Artificial Sequence
  Quasi-synthetic sequence derived from human genome
WLGSKARRELKRLKEEARRKHAVAVIWAYWLGLKVRREYRKFFR

SEQ ID NO: 36493 - protein, 44 aa, Artificial Sequence
  Quasi-synthetic sequence derived from human genome
FLKVIGKGSFGKVLLAKRKLDGKFYAVKVLQKKIVLNRKEQKHI

SEQ ID NO: 36494 - protein, 44 aa, Artificial Sequence
  Quasi-synthetic sequence derived from human genome
RYLRVKLTVRFRIPGLPGCILSFQLKVCFLPVMWLFILLSLALI

SEQ ID NO: 36495 - protein, 44 aa, Artificial Sequence
  Quasi-synthetic sequence derived from human genome
VTVNFFIFLKILKLLISKLKAHQMCFRDYKYRLAKSTLVLIPLL

SEQ ID NO: 36496 - protein, 44 aa, Artificial Sequence
  Quasi-synthetic sequence derived from human genome
RLKLLLMPLKHQPDFIYLRHVPLRRVHLFTFLQVLCLALLWILK

SEQ ID NO: 36497 - protein, 44 aa, Artificial Sequence
  Quasi-synthetic sequence derived from human genome
RRRCCRLCIWLLQTLVHLLQLGQVWRYLRALYLGLQSRWRGERL

SEQ ID NO: 36498 - protein, 44 aa, Artificial Sequence
  Quasi-synthetic sequence derived from human genome
RQRLRFGPRRALAALVRRGWRCGYLECSAKYNWHVLRLFRELLR

SEQ ID NO: 36499 - protein, 44 aa, Artificial Sequence
  Quasi-synthetic sequence derived from human genome
RLRHPRTRWKNWWVRGILTLAMIAFFFIIIYLGPMVLMIIVMCV

SEQ ID NO: 36500 - protein, 44 aa, Artificial Sequence
  Quasi-synthetic sequence derived from human genome
MKKFLYIKSVFHTLRMAQRRHKRVRTWTRHINIFNKDYIFVPVN

SEQ ID NO: 36501 - protein, 44 aa, Artificial Sequence
  Quasi-synthetic sequence derived from human genome
LARRAFQKRQQQQSALRVMQRNCAAYLKLRHWQWWRLFTKVKPL

SEQ ID NO: 36502 - protein, 44 aa, Artificial Sequence
  Quasi-synthetic sequence derived from human genome
KIRKHYLHLRATVVSIQRRYRKLTAVRTQAVICIQSYYRGFKVR

SEQ ID NO: 36503 - protein, 44 aa, Artificial Sequence
  Quasi-synthetic sequence derived from human genome
KQKKKYMPYNHQHKYFFLIGPPALLPLYFQWYIFYFVIQRKKWV

SEQ ID NO: 36504 - protein, 44 aa, Artificial Sequence
  Quasi-synthetic sequence derived from human genome
ILFLTCISVHRCLGVLRPLRSLRWGRARYARRVAGAVWVLVLAC

SEQ ID NO: 36505 - protein, 44 aa, Artificial Sequence
  Quasi-synthetic sequence derived from human genome
LGIEYTFPPLYYRRAHRRFVTKKALCIRVFQETQKLKKRRRALK

SEQ ID NO: 36506 - protein, 44 aa, Artificial Sequence
  Quasi-synthetic sequence derived from human genome
WYPVPCTRLPIRMAKALGKRTAKYRWFAVLYLLVCFLLLPSLVF

SEQ ID NO: 36507 - protein, 44 aa, Artificial Sequence
  Quasi-synthetic sequence derived from human genome
LQPSSFRNLRLPKRLRVVYFLARTRLAQRLIMAGTVVWIGILVY

SEQ ID NO: 36508 - protein, 44 aa, Artificial Sequence
  Quasi-synthetic sequence derived from human genome
LLLSIVILYCRIYSLVRTRSRRLTFRKNISKASRSSEKSLALLK

SEQ ID NO: 36509 - protein, 44 aa, Artificial Sequence
  Quasi-synthetic sequence derived from human genome
GRKIMRKVTTLPNTLVENTALPRQRARKRTKVLSLAKRILRFKK

SEQ ID NO: 36510 - protein, 44 aa, Artificial Sequence
  Quasi-synthetic sequence derived from human genome
RRKKRLRHRVPPRKPEPLVKLHRTALHWACLKGHSQLVNKLLVA

SEQ ID NO: 36511 - protein, 44 aa, Artificial Sequence
  Quasi-synthetic sequence derived from human genome
KKNTLKKYKIACIVLLALLVIMSLGLGLGLGLRKLEKQGSCRKK

SEQ ID NO: 36512 - protein, 44 aa, Artificial Sequence
  Quasi-synthetic sequence derived from human genome
RRKIFPGLILSDIKPAKRMKFKTVCYLLVQLMHCRKMFKAEIPF

SEQ ID NO: 36513 - protein, 44 aa, Artificial Sequence
  Quasi-synthetic sequence derived from human genome
LIILTGRHRGKRVVFLKQLASGLLLVTGPLVLNRVPLRRTHQKF

SEQ ID NO: 36514 - protein, 44 aa, Artificial Sequence
  Quasi-synthetic sequence derived from human genome
RLGRRLGRRRRPRSPPEPLRVRARLRLRSPSGAFAALGALVVLV

SEQ ID NO: 36515 - protein, 44 aa, Artificial Sequence
  Quasi-synthetic sequence derived from human genome
RKCKPQMNYDKLSRALRYYYNKRILHKTKGKRFTYKFNFNKLVL

SEQ ID NO: 36516 - protein, 44 aa, Artificial Sequence
  Quasi-synthetic sequence derived from human genome
KLSRALRYYYNKRILHKTKGKRFTYKFNFNKLVLVNYPFIDVGL

SEQ ID NO: 36517 - protein, 44 aa, Artificial Sequence
  Quasi-synthetic sequence derived from human genome
FLKITSTRLLCSRLCQQLRSKRKFFGTVPISRLHRRVVITGIGL

SEQ ID NO: 36518 - protein, 44 aa, Artificial Sequence
  Quasi-synthetic sequence derived from human genome
FLLSATFNASFLLKLQKWTQKKEKGKKLSRMKLLLKHLTLANLL

SEQ ID NO: 36519 - protein, 44 aa, Artificial Sequence
  Quasi-synthetic sequence derived from human genome
LKRHQEREKAARIIQLAVINFLAKQRLRKRVNAALVIQKYWRRV

SEQ ID NO: 36520 - protein, 44 aa, Artificial Sequence
  Quasi-synthetic sequence derived from human genome
LSLIIGLRKTFWFFFQRHKLKGTSFLLGGVVIVLLRWPLLGMFL

SEQ ID NO: 36521 - protein, 44 aa, Artificial Sequence
  Quasi-synthetic sequence derived from human genome
REFDRKYKKNIKALYIVHPTMFIKTLLILFKPLISFKFGQKIFY

SEQ ID NO: 36522 - protein, 44 aa, Artificial Sequence
  Quasi-synthetic sequence derived from human genome
LLYFLFICPFVLLLLLLISLLCLYWKARKLSTLRSNTRKEKALW

SEQ ID NO: 36523 - protein, 44 aa, Artificial Sequence
  Quasi-synthetic sequence derived from human genome
RTRGVGKVPRKKVNVKVFIIIAVFFICFVPFHFARIPYTLSQTR

SEQ ID NO: 36524 - protein, 44 aa, Artificial Sequence
  Quasi-synthetic sequence derived from human genome
LVPVLIITACYLTIVCKLQRNRLAKTKKPFKIIVTIIITFFLCW

SEQ ID NO: 36525 - protein, 44 aa, Artificial Sequence
  Quasi-synthetic sequence derived from human genome
LLKELVRFQDRMYQKDPVKAKTKRRLVLGLREVLKHLKLKKLKC

SEQ ID NO: 36526 - protein, 44 aa, Artificial Sequence
  Quasi-synthetic sequence derived from human genome
MLQWRRRHCCFAKMTWNAKRSLFRTHLIGVLSLVFLFAMFLFFN

SEQ ID NO: 36527 - protein, 44 aa, Artificial Sequence
  Quasi-synthetic sequence derived from human genome
SMAFRALGVATQTAIAAAIALLALTALLLVAMICRRRRRRKKAR

SEQ ID NO: 36528 - protein, 44 aa, Artificial Sequence
  Quasi-synthetic sequence derived from human genome
RRKVGDMWILFFLWLWTSFNTAFLALQSLRFGFGFRRGRSFLLR

SEQ ID NO: 36529 - protein, 44 aa, Artificial Sequence
  Quasi-synthetic sequence derived from human genome
CIMYKVPLIRKKSLRRTLSERGLLKDFLKKHNLNPARKYFPQWK

SEQ ID NO: 36530 - protein, 44 aa, Artificial Sequence
  Quasi-synthetic sequence derived from human genome
WRGYRQRKIYLEWLQYFKANLDAIIKIQAWARMWAARRQYLRRL

SEQ ID NO: 36531 - protein, 44 aa, Artificial Sequence
  Quasi-synthetic sequence derived from human genome
RLLWKKLCQYHFSERQIRKRLILSDKGQLDWKKMYFKLVRCYPR

SEQ ID NO: 36532 - protein, 44 aa, Artificial Sequence
  Quasi-synthetic sequence derived from human genome
RDRIRISRVCHRWKRLVDDRWLWRHVDLTLYTMRPKVMWHLLRR

SEQ ID NO: 36533 - protein, 44 aa, Artificial Sequence
  Quasi-synthetic sequence derived from human genome
RQRGVGQQAMSLAILRVIRLVRVFRIFKLSRHSKGLQILGQTLR

SEQ ID NO: 36534 - protein, 44 aa, Artificial Sequence
  Quasi-synthetic sequence derived from human genome
RLTRKRLCSFLIALYCLFSLYAAYHVFFGRRRQAPAGSPRGLRK

SEQ ID NO: 36535 - protein, 44 aa, Artificial Sequence
  Quasi-synthetic sequence derived from human genome
VRSLLSPGLLPHLLPALGFKNKTVLKKRCKDCYLVKRRGRWYVY

SEQ ID NO: 36536 - protein, 44 aa, Artificial Sequence
  Quasi-synthetic sequence derived from human genome
LRFKYLLKQALATGMRRGLLARPLNSKARGATGSFKLVPKHKKK

SEQ ID NO: 36537 - protein, 44 aa, Artificial Sequence
  Quasi-synthetic sequence derived from human genome
RLAAIVAKQVLLGRKVVVVRCEGINISGNFYRNKLKYLAFLRKR

SEQ ID NO: 36538 - protein, 44 aa, Artificial Sequence
  Quasi-synthetic sequence derived from human genome
IPRKRGKNPMKAVGLAWYSLYTRTWLGYLFYRQQLRRARNRYPK

SEQ ID NO: 36539 - protein, 44 aa, Artificial Sequence
  Quasi-synthetic sequence derived from human genome
RAAKWLHFPQLALRRRLGQLSCMSRPALKLRSWPLTVLYYLLPF

SEQ ID NO: 36540 - protein, 44 aa, Artificial Sequence
  Quasi-synthetic sequence derived from human genome
QLRGARVITPEDLLFLMRKDKKKLRRLLKYMFIRDYKSKIVKGI

SEQ ID NO: 36541 - protein, 44 aa, Artificial Sequence
  Quasi-synthetic sequence derived from human genome
KALKAKKAVLKGVHSHKKKKIRTSPTFRRPKTLRLRRQPKYPRK

SEQ ID NO: 36542 - protein, 44 aa, Artificial Sequence
  Quasi-synthetic sequence derived from human genome
RAACHLKLKNLHKAIEDSSKAYRIMKRHLRLIHPTKLYKLMLRR

SEQ ID NO: 36543 - protein, 44 aa, Artificial Sequence
  Quasi-synthetic sequence derived from human genome
FTWDKWLKVYKSIYFLGHIFFLSLLFILPYIHKAMVPRKEKLKK

SEQ ID NO: 36544 - protein, 44 aa, Artificial Sequence
  Quasi-synthetic sequence derived from human genome
LAILKAVKIIQGCFYTKLERTRFLNVRASAIIIQRKWRAILPAK

SEQ ID NO: 36545 - protein, 44 aa, Artificial Sequence
  Quasi-synthetic sequence derived from human genome
VKVFHKYSNSNRYKIRHTKKKTFKCMKCSKSFFMLSHLIQHKRI

SEQ ID NO: 36546 - protein, 44 aa, Artificial Sequence
  Quasi-synthetic sequence derived from human genome
GKPRGQPNTALLSLVLMAGTFFIAFFLRKFKNSRFFPGRIRRVI

SEQ ID NO: 36547 - protein, 44 aa, Artificial Sequence
  Quasi-synthetic sequence derived from human genome
PVPGAKKSAKLYIPYIILTIIILTIVGFIWLLKVNGCRKYKLNK

SEQ ID NO: 36548 - protein, 44 aa, Artificial Sequence
  Quasi-synthetic sequence derived from human genome
LLIVVKVRAAGVRVGCVRRRSERKVTRMVLVVVLVFAGCWLPFF

SEQ ID NO: 36549 - protein, 44 aa, Artificial Sequence
  Quasi-synthetic sequence derived from human genome
KILGVLRVLRLLRTLRPLRVISRAPGLKLVVETLISSLRPIGNI

SEQ ID NO: 36550 - protein, 44 aa, Artificial Sequence
  Quasi-synthetic sequence derived from human genome
LLNKLSILASKLAPAMKTQKLRYRRCSSELLPMAKSYKRLRYKR

SEQ ID NO: 36551 - protein, 44 aa, Artificial Sequence
  Quasi-synthetic sequence derived from human genome
KIQLAVSHMGVLVFQGTTKINTFNWSKVRKLSFKRKRFLIKLHP

SEQ ID NO: 36552 - protein, 44 aa, Artificial Sequence
  Quasi-synthetic sequence derived from human genome
RGAPRGSRRPGRTPKWRLPRISARAPYRLRRLRRHTYWPPRRPV

SEQ ID NO: 36553 - protein, 44 aa, Artificial Sequence
  Quasi-synthetic sequence derived from human genome
KKNRLFSKVLVTIKKVYMKERSFKGVEFGKNLGLKSSLIRKPRI

SEQ ID NO: 36554 - protein, 44 aa, Artificial Sequence
  Quasi-synthetic sequence derived from human genome
KVSLFTAFFLATIMGVRFKRSKKIMPAGLVAGLSLMMILRLVLL

SEQ ID NO: 36555 - protein, 44 aa, Artificial Sequence
  Quasi-synthetic sequence derived from human genome
LYLKWRVKKVVLVLLLVTSVFLFLNIALINIHINASINGYRRNK

SEQ ID NO: 36556 - protein, 44 aa, Artificial Sequence
  Quasi-synthetic sequence derived from human genome
ITLQPSSFRNLRLPKRLRVVYFLARTRLAQRLIMAGTVVWIGIL

SEQ ID NO: 36557 - protein, 44 aa, Artificial Sequence
  Quasi-synthetic sequence derived from human genome
QRRMFHATVATQTQFFHVKVLNINLKRKFIKKRIIIISNYSKRN

SEQ ID NO: 36558 - protein, 44 aa, Artificial Sequence
  Quasi-synthetic sequence derived from human genome
KKQRLSKKLRRKLQMWLWSQTFCPVLYAWNDLGSRFWPRYVKVG

SEQ ID NO: 36559 - protein, 44 aa, Artificial Sequence
  Quasi-synthetic sequence derived from human genome
KFKVIALTVLASVRIYYQYRRVKPVTREIVIRDPYALRPLRRLI

SEQ ID NO: 36560 - protein, 44 aa, Artificial Sequence
  Quasi-synthetic sequence derived from human genome
LAVTRPFLAPRLRSPALARRLLLAVWLAALLLAVPAAVYRHLWR

SEQ ID NO: 36561 - protein, 44 aa, Artificial Sequence
  Quasi-synthetic sequence derived from human genome
KRKFKSLLLHKRTAIQHAYRLLISQRRPAGISYRQFEGLMRFYK

SEQ ID NO: 36562 - protein, 44 aa, Artificial Sequence
  Quasi-synthetic sequence derived from human genome
RYLAIVHATRTLTQKRYLVKFICLSIWGLSLLLALPVLLFRRTV

SEQ ID NO: 36563 - protein, 44 aa, Artificial Sequence
  Quasi-synthetic sequence derived from human genome
RYYRLAPMRLYTLSKRHFVLVFVVFFICFGLTIFVGIRGPKVIQ

SEQ ID NO: 36564 - protein, 44 aa, Artificial Sequence
  Quasi-synthetic sequence derived from human genome
VIKIQSSYRRWMIRKRMREMHRAATFIQSTFRMHRLHMRYQALK

SEQ ID NO: 36565 - protein, 44 aa, Artificial Sequence
  Quasi-synthetic sequence derived from human genome
QRPKRYFTIVIISSSLLLGLIVLLLISYVMWKAGFFKRQYKSIL

SEQ ID NO: 36566 - protein, 44 aa, Artificial Sequence
  Quasi-synthetic sequence derived from human genome
HSPLTSIISAVVGILLVVVLGVVFGILIKRRQQKIRKYTMRRLL

SEQ ID NO: 36567 - protein, 44 aa, Artificial Sequence
  Quasi-synthetic sequence derived from human genome
LTVRPPLLPYIVNIKGQRIKKSVAYKTKKPPSLMYNVRKKKGKI

SEQ ID NO: 36568 - protein, 44 aa, Artificial Sequence
  Quasi-synthetic sequence derived from human genome
LPLVAMAAGGRWVRQQGPRVRRGISRLWLRVLLRLSPMAFRALQ

SEQ ID NO: 36569 - protein, 44 aa, Artificial Sequence
  Quasi-synthetic sequence derived from human genome
RLLYPRQEVVQATLVVLALAMVPILLLGTPLHLLHRHRRRLRRR

SEQ ID NO: 36570 - protein, 44 aa, Artificial Sequence
  Quasi-synthetic sequence derived from human genome
RRVVQIFRIMRILRILKLARHSTGLQSLGFTLRRSYNELGLLIL

SEQ ID NO: 36571 - protein, 44 aa, Artificial Sequence
  Quasi-synthetic sequence derived from human genome
KILGVLRVLRLLRTLRPLRVISRAPGLKLVVETLISSLKPIGNI

SEQ ID NO: 36572 - protein, 44 aa, Artificial Sequence
  Quasi-synthetic sequence derived from human genome
LRLRKNTVKFSLYRHFKNTLIFAVLASIVFMGWTTKTFRIAKCQ

SEQ ID NO: 36573 - protein, 44 aa, Artificial Sequence
  Quasi-synthetic sequence derived from human genome
WLLYCHKTRLKKILKESRQRHLENFRIRAKHLAANWNRIRTSRR

SEQ ID NO: 36574 - protein, 44 aa, Artificial Sequence
  Quasi-synthetic sequence derived from human genome
VRIKTSIFSLFRAPKLRMRVFGLCFVRFAITVPFYGLILNLQHL

SEQ ID NO: 36575 - protein, 44 aa, Artificial Sequence
  Quasi-synthetic sequence derived from human genome
IYPGHGMMFVRNDCKVFRFCKSKCHKNFKKKRNPRKVRWTKAFR

SEQ ID NO: 36576 - protein, 44 aa, Artificial Sequence
  Quasi-synthetic sequence derived from human genome
TVNIPLFRRFGRQRKIGGRGRIISPYRTPVLRRHRYSIFRSTTR

SEQ ID NO: 36577 - protein, 44 aa, Artificial Sequence
  Quasi-synthetic sequence derived from human genome
ARKKYRFHKTRSHVTHRTTKVKKSPKVRKKSYLSRLMLANRLPF

SEQ ID NO: 36578 - protein, 44 aa, Artificial Sequence
  Quasi-synthetic sequence derived from human genome
LRYSSILTSNRVAKMGLILAIRSILLVIPFPFTLRRLKYCQKNL

SEQ ID NO: 36579 - protein, 44 aa, Artificial Sequence
  Quasi-synthetic sequence derived from human genome
TFRCILLRWARLLGFATVYGTVTLKLHRVLKVFLSRTAQRIPYM

SEQ ID NO: 36580 - protein, 44 aa, Artificial Sequence
  Quasi-synthetic sequence derived from human genome
IQLGRKLITKYNRRELTDKLLIFLALALFLATVLYIVKKRLFPF

SEQ ID NO: 36581 - protein, 44 aa, Artificial Sequence
  Quasi-synthetic sequence derived from human genome
AVMIPQNVHRILINLMKYLQKWKRYRPLWKLDKAIVMEKFAAKK

SEQ ID NO: 36582 - protein, 44 aa, Artificial Sequence
  Quasi-synthetic sequence derived from human genome
RFTKITQYLIRIRKLTLKRQRKLVPLSKKVERREKRREEKALIA

SEQ ID NO: 36583 - protein, 44 aa, Artificial Sequence
  Quasi-synthetic sequence derived from human genome
RFRFRAFHFLNRFPSVYLRCKMVVCRAYDPSSRCYRGCVLRSKR

SEQ ID NO: 36584 - protein, 44 aa, Artificial Sequence
  Quasi-synthetic sequence derived from human genome
RLTFFFLIPLFIMIGCYLVIIHNLLHGRTSKLKPKVKEKSIRII

SEQ ID NO: 36585 - protein, 44 aa, Artificial Sequence
  Quasi-synthetic sequence derived from human genome
ATPPFRLIRKMFSFKVSRWMGLACFRSLAASSPSIRQKKLMHKL

SEQ ID NO: 36586 - protein, 44 aa, Artificial Sequence
  Quasi-synthetic sequence derived from human genome
KLKLNVLTIILLPVHLLITIYSALIFIPWYFLTNAKKKNAMAKR

SEQ ID NO: 36587 - protein, 44 aa, Artificial Sequence
  Quasi-synthetic sequence derived from human genome
RGWLQKVKYHRLKGATLTLQRYCRGHLARRLAEHLRRIRAAVVL

SEQ ID NO: 36588 - protein, 44 aa, Artificial Sequence
  Quasi-synthetic sequence derived from human genome
QIVLAKKMLRKALKLLNRIFPYNLISLFLHIHVEKNRHFHYVNR

SEQ ID NO: 36589 - protein, 44 aa, Artificial Sequence
  Quasi-synthetic sequence derived from human genome
LKIKLAVRMDKPQNMKHSGYLWAIGKNVWKRWKKRFFVLVQVSQ

SEQ ID NO: 36590 - protein, 44 aa, Artificial Sequence
  Quasi-synthetic sequence derived from human genome
LLKIANFSNLIFLHLKRRVKSVILVMLLGPLLFLACQLFVINMK

SEQ ID NO: 36591 - protein, 44 aa, Artificial Sequence
  Quasi-synthetic sequence derived from human genome
FILGFLVPLTIICLCYLFIIIKVKSSGIRVGSSKRKKSEKKVTR

SEQ ID NO: 36592 - protein, 44 aa, Artificial Sequence
  Quasi-synthetic sequence derived from human genome
RGRLRRLLWIGFTLTAVALILWQCALLVFSFYTVSVSIKVHFRK

SEQ ID NO: 36593 - protein, 44 aa, Artificial Sequence
  Quasi-synthetic sequence derived from human genome
VVMRFSLAVLYQACCVALLLWLALLLSIQRRLPRERKIKYSKLL

SEQ ID NO: 36594 - protein, 44 aa, Artificial Sequence
  Quasi-synthetic sequence derived from human genome
SWWRGTLGRRKAAKRKWAAQTIRRLIRGFVLRHAPRCPENAFFL

SEQ ID NO: 36595 - protein, 44 aa, Artificial Sequence
  Quasi-synthetic sequence derived from human genome
RFQTPGRFSWFCKRRRAFWHTPRLPTLPKRVPRAGEARNLRVLR

SEQ ID NO: 36596 - protein, 44 aa, Artificial Sequence
  Quasi-synthetic sequence derived from human genome
LRCIRLLRIFKITKYWTSLSNLVASLLNSIRSIASLLLLLFLFI

SEQ ID NO: 36597 - protein, 44 aa, Artificial Sequence
  Quasi-synthetic sequence derived from human genome
CKFVRFLFYWNLYCSVLFLTCISVHRYLGICHPLRALRWGRPRL

SEQ ID NO: 36598 - protein, 44 aa, Artificial Sequence
  Quasi-synthetic sequence derived from human genome
FKRAFLRLLRCQCRRRRRRRPLWRVYGHHWRASTSGLRQDCAPS

SEQ ID NO: 36599 - protein, 44 aa, Artificial Sequence
  Quasi-synthetic sequence derived from human genome
KRRQARRTAVIVQQKLRSSLLTKKQDQAARKIMRFLRRCRHRVK

SEQ ID NO: 36600 - protein, 44 aa, Artificial Sequence
  Quasi-synthetic sequence derived from human genome
FCQKGFKIQSKLLKHKQIHTRNKAFRALLLKKRRTESRPLPNKL

SEQ ID NO: 36601 - protein, 44 aa, Artificial Sequence
  Quasi-synthetic sequence derived from human genome
FWRNKKSNKVLPMRRVLRKRPSPAPRTIRIEWLKSKSTKAATKF

SEQ ID NO: 36602 - protein, 44 aa, Artificial Sequence
  Quasi-synthetic sequence derived from human genome
LRKVHLFTIIQMSCLGLLWIIKVSRAAIVFPMMVLALVFVRKLM

SEQ ID NO: 36603 - protein, 44 aa, Artificial Sequence
  Quasi-synthetic sequence derived from human genome
IIRLPILFAIGVNFLIFVRVICIVVSKLKANLMCKTDIKCRLAK

SEQ ID NO: 36604 - protein, 44 aa, Artificial Sequence
  Quasi-synthetic sequence derived from human genome
MRYPIWLITPQTYLIIWVITNCVSTMLLLWTFLLQRRFVKKRGK

SEQ ID NO: 36605 - protein, 44 aa, Artificial Sequence
  Quasi-synthetic sequence derived from human genome
VCHGVLKRPARLPCSHIFCKKCILRWLARQKTCPCCRKEVKRKK

SEQ ID NO: 36606 - protein, 44 aa, Artificial Sequence
  Quasi-synthetic sequence derived from human genome
RRLRAIYTIMRWFRRHKVRAHLAELQRRFQAARQPPLYGRDLVW

SEQ ID NO: 36607 - protein, 44 aa, Artificial Sequence
  Quasi-synthetic sequence derived from human genome
RSVFHGAIMSVFPVVMYFWKRFCFWKATRSYLQYRGKKFKDRKS

SEQ ID NO: 36608 - protein, 44 aa, Artificial Sequence
  Quasi-synthetic sequence derived from human genome
VRALHRLHQFQQLLWVLGLLVGLLLLLLGLGACYTWRRRRVCKQ

SEQ ID NO: 36609 - protein, 44 aa, Artificial Sequence
  Quasi-synthetic sequence derived from human genome
MFTRAQVRRILQRVPGKQRFGIYRFLPFFFVLGGTMEWIMIKVR

SEQ ID NO: 36610 - protein, 44 aa, Artificial Sequence
  Quasi-synthetic sequence derived from human genome
LLKTVSYKACLPPSLRDLIQGLSFVTRRRIRRTVRRALRRVAAC

SEQ ID NO: 36611 - protein, 44 aa, Artificial Sequence
  Quasi-synthetic sequence derived from human genome
MRKRKISVCQQTWALLCKNFLKKWRMKRESLMEWLNSLLLLLCL

SEQ ID NO: 36612 - protein, 44 aa, Artificial Sequence
  Quasi-synthetic sequence derived from human genome
KTPSQKRYVAYFAQVKHLYNWNLPPRRILFIKHFIIYSIPRYVR

SEQ ID NO: 36613 - protein, 44 aa, Artificial Sequence
  Quasi-synthetic sequence derived from human genome
KVLFRKSEKYMKLFLWLLVGVGLLGLGLRHKAYERKLGKVAPTK

SEQ ID NO: 36614 - protein, 44 aa, Artificial Sequence
  Quasi-synthetic sequence derived from human genome
IVFKHKHKDCVLYLLSKMWSTVSFPKISVPMRIYIKIKQWILRA

SEQ ID NO: 36615 - protein, 44 aa, Artificial Sequence
  Quasi-synthetic sequence derived from human genome
RPRRPRRRASRAFCPRPCALPGRPGLTLLCRPRCRRQPRLRLPT

SEQ ID NO: 36616 - protein, 44 aa, Artificial Sequence
  Quasi-synthetic sequence derived from human genome
WSIFYVTVLAFTLIVLTGGFTWLCICCCKRQKRTKIRKKTKYTI

SEQ ID NO: 36617 - protein, 44 aa, Artificial Sequence
  Quasi-synthetic sequence derived from human genome
FLVLQRRRLPPVRPHGPGPARGRPPHPALPHRRRLHGRPVRRLF

SEQ ID NO: 36618 - protein, 44 aa, Artificial Sequence
  Quasi-synthetic sequence derived from human genome
MRKEVKRIRVLVIRKLVRSVGRLKSKKGTEDALLKNQRRAQRLL

SEQ ID NO: 36619 - protein, 44 aa, Artificial Sequence
  Quasi-synthetic sequence derived from human genome
RLFDYRGRLSPVPVPRAVPVKRPRVTVPLVRRVKTNVPVKLFAR

SEQ ID NO: 36620 - protein, 44 aa, Artificial Sequence
  Quasi-synthetic sequence derived from human genome
PAKKKRKKGLRIKGKRRRKKLILAKKFSKDLGSGRPVADAPALL

SEQ ID NO: 36621 - protein, 44 aa, Artificial Sequence
  Quasi-synthetic sequence derived from human genome
MKWLLLLGLVALSECIMYKVPLIRKKSLRRTLSERGLLKDFLKK

SEQ ID NO: 36622 - protein, 44 aa, Artificial Sequence
  Quasi-synthetic sequence derived from human genome
RPLQRRERRYLQRRREKLMLARRGITLQKMEMPKQTRHRKLKVL

SEQ ID NO: 36623 - protein, 44 aa, Artificial Sequence
  Quasi-synthetic sequence derived from human genome
MRSGGRGRPRLRLGERGLMEPLLPPKRRLLPRVRLLPLLLALAV

SEQ ID NO: 36624 - protein, 44 aa, Artificial Sequence
  Quasi-synthetic sequence derived from human genome
LLLILLCMSLLLFQVIRLYQRRRWMIRALHLFPAPPAHWFYGHK

SEQ ID NO: 36625 - protein, 44 aa, Artificial Sequence
  Quasi-synthetic sequence derived from human genome
IEWKTLQKKKQQKIKEKLRIRTKAAVKIQAWWRGTLVRRTLLHA

SEQ ID NO: 36626 - protein, 44 aa, Artificial Sequence
  Quasi-synthetic sequence derived from human genome
TPLLPLLLRLLLSCLLLPAARLARQYLLPLLRRLARRLGSQDMR

SEQ ID NO: 36627 - protein, 44 aa, Artificial Sequence
  Quasi-synthetic sequence derived from human genome
RISITFFRLFRVMRLVKLLSRGEGIRTLLWTFIKSFQALPYVAL

SEQ ID NO: 36628 - protein, 44 aa, Artificial Sequence
  Quasi-synthetic sequence derived from human genome
IFWINFLIVIVCYTLITKELYRSYVRTRGVGKVPRKKVNVKVFI

SEQ ID NO: 36629 - protein, 44 aa, Artificial Sequence
  Quasi-synthetic sequence derived from human genome
KLVPVRRRAWGQLCLPPQRLRVTRHPLIPAPVLGLLLLLLLSVL

SEQ ID NO: 36630 - protein, 44 aa, Artificial Sequence
  Quasi-synthetic sequence derived from human genome
LRPLDTVQRPKGYRKLLALGTWLLALLLTLPVMLAMRLVRRGPK

SEQ ID NO: 36631 - protein, 44 aa, Artificial Sequence
  Quasi-synthetic sequence derived from human genome
ILLALGALLVLQLIRRRRREHGALWLPPGFTRRPRTQSAPHRRR

SEQ ID NO: 36632 - protein, 44 aa, Artificial Sequence
  Quasi-synthetic sequence derived from human genome
VLPKPRMRGLLARRLRNHMAVAFVLSLGVAALYKFRVADQRKKA

SEQ ID NO: 36633 - protein, 44 aa, Artificial Sequence
  Quasi-synthetic sequence derived from human genome
KIRRKNCPACRLRKCCQAGMVLGGRKFKKFNKVRVVRALDAVAL

SEQ ID NO: 36634 - protein, 44 aa, Artificial Sequence
  Quasi-synthetic sequence derived from human genome
LLLPKGVVLKLKPVATRFPRKAWRQKRSSVLKPLLIQPSPSLQP

SEQ ID NO: 36635 - protein, 44 aa, Artificial Sequence
  Quasi-synthetic sequence derived from human genome
FIRIFQLSNNIRSVVLRHCKKRQSHLRLTLKNNVFLFIDKLSYR

SEQ ID NO: 36636 - protein, 44 aa, Artificial Sequence
  Quasi-synthetic sequence derived from human genome
LMIGIASAGVAVYRKYICTSFYPWVNILKISFKRKKFFIHQRQK

SEQ ID NO: 36637 - protein, 44 aa, Artificial Sequence
  Quasi-synthetic sequence derived from human genome
KLRSWPLTVLYYLLPFGALRPLSRVGWRPVSRVALYKSVPTRLL

SEQ ID NO: 36638 - protein, 44 aa, Artificial Sequence
  Quasi-synthetic sequence derived from human genome
MFYAYVEMKRKKRVHFHGFMLDVHKRIHRLKQSLPKRKPGFMAK

SEQ ID NO: 36639 - protein, 44 aa, Artificial Sequence
  Quasi-synthetic sequence derived from human genome
RRKRKRSKRKKEVPFFGRRMHHTCPCLPGLACLRTSFNRFICLA

SEQ ID NO: 36640 - protein, 44 aa, Artificial Sequence
  Quasi-synthetic sequence derived from human genome
VWKFQRYQLIMTFHDRPVLPPPMIILSHIYIIIMRLSGRCRKKR

SEQ ID NO: 36641 - protein, 44 aa, Artificial Sequence
  Quasi-synthetic sequence derived from human genome
RLLPRNTFSRKAFKLKKPSKYCSWKCAALSAIAAALLLAILLAY

SEQ ID NO: 36642 - protein, 44 aa, Artificial Sequence
  Quasi-synthetic sequence derived from human genome
HRLRVQQAALRAARLRHQELFRLRGIKAQVALRLAELARRQRRR

SEQ ID NO: 36643 - protein, 44 aa, Artificial Sequence
  Quasi-synthetic sequence derived from human genome
RFLFNELRPAVCNDLSIMSKFKLLSSLPRWRRIAQKIIRERRKK

SEQ ID NO: 36644 - protein, 44 aa, Artificial Sequence
  Quasi-synthetic sequence derived from human genome
LKTLLRCRNEKKRHRAVRLIFTIMIVYFLFWAPYNIVLLLNTFQ

SEQ ID NO: 36645 - protein, 44 aa, Artificial Sequence
  Quasi-synthetic sequence derived from human genome
KCALVRHKFNRLPRVLILHLKRYSFNVALSLNNKIGQQVIIPRY

SEQ ID NO: 36646 - protein, 44 aa, Artificial Sequence
  Quasi-synthetic sequence derived from human genome
LLVFTALAILIMRLKMFLTPHMCVMASLICSRQLFGWLFRRVRF

SEQ ID NO: 36647 - protein, 44 aa, Artificial Sequence
  Quasi-synthetic sequence derived from human genome
RASFKRARRPGARALRLVLGIVLLFWACFLPFWLWQLLAQYHQA

SEQ ID NO: 36648 - protein, 44 aa, Artificial Sequence
  Quasi-synthetic sequence derived from human genome
IMVSFGRRVLCYPLYRHFKLVMKAYRDTIKILQLGKSAVLKCLL

SEQ ID NO: 36649 - protein, 44 aa, Artificial Sequence
  Quasi-synthetic sequence derived from human genome
RLFRVMRLIKLLSRAEGVRTLLWTFIKSFQALPYVALLIVMLFF

SEQ ID NO: 36650 - protein, 44 aa, Artificial Sequence
  Quasi-synthetic sequence derived from human genome
MAKPFFRLQKFLRRTQFLLFFLTAAYLMTGSLLLLQRVRVALPQ

SEQ ID NO: 36651 - protein, 44 aa, Artificial Sequence
  Quasi-synthetic sequence derived from human genome
ARGYLARQRYQQMRRSLVKFRSLVHAYVSRRRYLKLRAEWRCQV

SEQ ID NO: 36652 - protein, 44 aa, Artificial Sequence
  Quasi-synthetic sequence derived from human genome
LIKKAVAVRKHLERNRKDKDAKFRLILIESRIHRLARYYKTKRV

SEQ ID NO: 36653 - protein, 44 aa, Artificial Sequence
  Quasi-synthetic sequence derived from human genome
LNLKKTAIKIQSVYRGIRVRRHIQHMHRAATFIKAMFKMHQSRI

SEQ ID NO: 36654 - protein, 44 aa, Artificial Sequence
  Quasi-synthetic sequence derived from human genome
LVLGFVLPVCTICVLYTDLLRRLRAVRLRSGAKALGKARRKVTV

SEQ ID NO: 36655 - protein, 44 aa, Artificial Sequence
  Quasi-synthetic sequence derived from human genome
FMQLQQRLLREKEAKIRKALDRLRKKRHLLRRQRTRREFPVISV

SEQ ID NO: 36656 - protein, 44 aa, Artificial Sequence
  Quasi-synthetic sequence derived from human genome
LTGRLAQARGAAKKAGLLMALARLCFLLGRLCSRRLKLSQARVY

SEQ ID NO: 36657 - protein, 44 aa, Artificial Sequence
  Quasi-synthetic sequence derived from human genome
RIARILAGSKKKICTKKPRFMSACAQLVIAFILICIQLGIIVAL

SEQ ID NO: 36658 - protein, 44 aa, Artificial Sequence
  Quasi-synthetic sequence derived from human genome
KKKMSKLSRSARAGVIFPVGRLMRYLKKGTFKYRISVGAPVYMA

SEQ ID NO: 36659 - protein, 44 aa, Artificial Sequence
  Quasi-synthetic sequence derived from human genome
GICLILIVIFMITKFVQDRHRARRNRLRKDQLKKLPVHKFKKGD

SEQ ID NO: 36660 - protein, 44 aa, Artificial Sequence
  Quasi-synthetic sequence derived from human genome
CRTLRQRSRRPKMRPARRRGGRRQLLLRALDAVATCWEKLFALR

SEQ ID NO: 36661 - protein, 44 aa, Artificial Sequence
  Quasi-synthetic sequence derived from human genome
KIYRGWRCRTHYQLMRKSQILISSWFRGNMQKKCYGKIKASVLL

SEQ ID NO: 36662 - protein, 44 aa, Artificial Sequence
  Quasi-synthetic sequence derived from human genome
KRQRLPSVENRPKIAAFLPARQLWKWFGKPTQRRGMKGKARKLF

SEQ ID NO: 36663 - protein, 44 aa, Artificial Sequence
  Quasi-synthetic sequence derived from human genome
GPFLRKCFAISLLVICIIISIGIFYGFVANHQVRTRIKRSRKLA

SEQ ID NO: 36664 - protein, 44 aa, Artificial Sequence
  Quasi-synthetic sequence derived from human genome
RVCRRLRRANRVLRARCRRAVKSNACYWAVLLLVFLNTLTIASE

SEQ ID NO: 36665 - protein, 44 aa, Artificial Sequence
  Quasi-synthetic sequence derived from human genome
LRNAKIYVERAVKQKKIFTIQGCYPVIRCLLRRRGWVEKKMVHR

SEQ ID NO: 36666 - protein, 44 aa, Artificial Sequence
  Quasi-synthetic sequence derived from human genome
KKKVNKGSTAARTFYLIKDIRFLLHEPIVNKFREYKVFVRKLRK

SEQ ID NO: 36667 - protein, 44 aa, Artificial Sequence
  Quasi-synthetic sequence derived from human genome
CLPFVLAAAVSRKKKRRMGTYSLVPKKKTKVLKQRTVIEMFKSI

SEQ ID NO: 36668 - protein, 44 aa, Artificial Sequence
  Quasi-synthetic sequence derived from human genome
FYRNHKTFMVLNRKRTIYRFSAKHALFIFGPFNSIRSLAIRVSV

SEQ ID NO: 36669 - protein, 44 aa, Artificial Sequence
  Quasi-synthetic sequence derived from human genome
KKTWMFGLPFCKFVSAMLHIHMYLTFLFYVVILVTRYLIFFKCK

SEQ ID NO: 36670 - protein, 44 aa, Artificial Sequence
  Quasi-synthetic sequence derived from human genome
LVYGLVGAGVVLMLIILVALLMLVFRSKREVKRQKYRLSQLYKW

SEQ ID NO: 36671 - protein, 44 aa, Artificial Sequence
  Quasi-synthetic sequence derived from human genome
MGSPRAARPPLLLRPVKLLRRRFRLLLALAVVSVGLWTLYLELV

SEQ ID NO: 36672 - protein, 44 aa, Artificial Sequence
  Quasi-synthetic sequence derived from human genome
QKSLRPIGLLRAQSLEWFYNNVKSRFKRFGSAKVLKNLYRKHRL

SEQ ID NO: 36673 - protein, 44 aa, Artificial Sequence
  Quasi-synthetic sequence derived from human genome
WLATSLSIFYLLKIVNFSRLIFHHLKRKAKSVVLVIVLGSLFFL

SEQ ID NO: 36674 - protein, 44 aa, Artificial Sequence
  Quasi-synthetic sequence derived from human genome
HTYHIKNYIMNKDLLRRVLVLMNSKHTFLALCALRFMRRIIGLK

SEQ ID NO: 36675 - protein, 44 aa, Artificial Sequence
  Quasi-synthetic sequence derived from human genome
KLLKGASKLLTARTGIEVPRQFLRKKVLLRGFSPSHLRAYARRM

SEQ ID NO: 36676 - protein, 44 aa, Artificial Sequence
  Quasi-synthetic sequence derived from human genome
KTHCLATKKLDLWRLPPFLIIHLKRFQFVNDQWIKSQKIVRFLR

SEQ ID NO: 36677 - protein, 44 aa, Artificial Sequence
  Quasi-synthetic sequence derived from human genome
KKTFIVLNKGKAIFRFSATPALYLLSPFSVVRRGAIKVLIHALF

SEQ ID NO: 36678 - protein, 44 aa, Artificial Sequence
  Quasi-synthetic sequence derived from human genome
KLRLDKLRQSCVMVQKHMRGWLQRKKFLRERRAALIIQQYFRGQ

SEQ ID NO: 36679 - protein, 44 aa, Artificial Sequence
  Quasi-synthetic sequence derived from human genome
RALCLLCFYLKYLNMYASICFLTCISLQRCFFLLKPFRARDWKR

SEQ ID NO: 36680 - protein, 44 aa, Artificial Sequence
  Quasi-synthetic sequence derived from human genome
KGAVLYLLRGRKTFLIPVLFNNYITAALKLLEKLYKVNLKVKHV

SEQ ID NO: 36681 - protein, 44 aa, Artificial Sequence
  Quasi-synthetic sequence derived from human genome
QPKGQKKKKIVKYGMGGLIILFLIAIIWFPLLFMSLVRSVVGVV

SEQ ID NO: 36682 - protein, 44 aa, Artificial Sequence
  Quasi-synthetic sequence derived from human genome
RGHALPGTFFFIIGLWWCTKSILKYICKKQKRTCYLGSKTLFYR

SEQ ID NO: 36683 - protein, 44 aa, Artificial Sequence
  Quasi-synthetic sequence derived from human genome
RHFLLRKKQEKFTSGIIKIQALWRGYSWRKKNDCTKIKAIRLSL

SEQ ID NO: 36684 - protein, 44 aa, Artificial Sequence
  Quasi-synthetic sequence derived from human genome
LLMVLRCLRPLRIFKLVPQMRKVVRELFSGFKEIFLVSILLLTL

SEQ ID NO: 36685 - protein, 44 aa, Artificial Sequence
  Quasi-synthetic sequence derived from human genome
KTRYRIVKKTPASPLSAPPFPLSLPSWRARRLSLSRSLVLNRLR

SEQ ID NO: 36686 - protein, 44 aa, Artificial Sequence
  Quasi-synthetic sequence derived from human genome
WQRRVATWFNQPARKIRRRKARQAKARRIAPRPASGPIRPIVRC

SEQ ID NO: 36687 - protein, 44 aa, Artificial Sequence
  Quasi-synthetic sequence derived from human genome
LRKILLRKFCQMRKRRLREQAPLLPTPTVIDPSRFCAQPFRWFL

SEQ ID NO: 36688 - protein, 44 aa, Artificial Sequence
  Quasi-synthetic sequence derived from human genome
RTLLLKNYLIKCRTKKSSVQEILFPLFFLFWLILISMMHPNKKY

SEQ ID NO: 36689 - protein, 44 aa, Artificial Sequence
  Quasi-synthetic sequence derived from human genome
KKKTTFFKRGKKLKCYLMPFGTGTSKCPGRFFALMEIKQLLVIL

SEQ ID NO: 36690 - protein, 44 aa, Artificial Sequence
  Quasi-synthetic sequence derived from human genome
RKGIVRVVFFPFFFRWWLQVTSKVIFFWLLVLYLLQVAAIVLFC

SEQ ID NO: 36691 - protein, 44 aa, Artificial Sequence
  Quasi-synthetic sequence derived from human genome
LARQHFKKRKIQDLAIRCVQKNIKKNKGVKDWPWWKLFTTVRPL

SEQ ID NO: 36692 - protein, 44 aa, Artificial Sequence
  Quasi-synthetic sequence derived from human genome
ISLRFKRTHIKMKKQPKGYGLRCHRAIITICRLIGIKDMYAKVS

SEQ ID NO: 36693 - protein, 44 aa, Artificial Sequence
  Quasi-synthetic sequence derived from human genome
MRRMALSMIERRKRWRTIKLLLRRGADPNLCCVPMQVLFLAVKA

SEQ ID NO: 36694 - protein, 44 aa, Artificial Sequence
  Quasi-synthetic sequence derived from human genome
PKTSFNWFVNPLKTFVFFIWRRYWRTLVLLLLVLLTVFLLLVFY

SEQ ID NO: 36695 - protein, 44 aa, Artificial Sequence
  Quasi-synthetic sequence derived from human genome
LMAFLIMVVVYLRIYVYVKRKTNVLSPHTSGSISRRRTPMKLMK

SEQ ID NO: 36696 - protein, 44 aa, Artificial Sequence
  Quasi-synthetic sequence derived from human genome
KYKKFPHWLDKWMLTRKQFGLLSLFFAVLHAIYTLSYAMRRSYR

SEQ ID NO: 36697 - protein, 44 aa, Artificial Sequence
  Quasi-synthetic sequence derived from human genome
PVFWRRLLGLLPGRPGLAALLGRLSDRLGRNRDRQRRRSPWLLL

SEQ ID NO: 36698 - protein, 44 aa, Artificial Sequence
  Quasi-synthetic sequence derived from human genome
RLVVYKIVYMFLFLLCLTLFQVYYSLWRKLLKAFWWLVVAYTML

SEQ ID NO: 36699 - protein, 44 aa, Artificial Sequence
  Quasi-synthetic sequence derived from human genome
FLVKRGHIVHNWKARWFILRQNTLVYYKLEGGRRVTPPKGRILL

SEQ ID NO: 36700 - protein, 44 aa, Artificial Sequence
  Quasi-synthetic sequence derived from human genome
ALPFFCFLLGKCFKKGLKGKGFVLLVKLACIVVASFVLCWLPFF

SEQ ID NO: 36701 - protein, 44 aa, Artificial Sequence
  Quasi-synthetic sequence derived from human genome
LVSLKWKRYGRPYFCMLGAIYLLYIICFTMCCIYRPLKPRTNNR

SEQ ID NO: 36702 - protein, 44 aa, Artificial Sequence
  Quasi-synthetic sequence derived from human genome
KLWSFFIYLLRRQIRTVIQYQTVRYDILPLSPVSRNRLAQVKRK

SEQ ID NO: 36703 - protein, 44 aa, Artificial Sequence
  Quasi-synthetic sequence derived from human genome
AVGRVQGWALTRQQLQALLLKRFLLARRSRRGLFAQIVLPALFV

SEQ ID NO: 36704 - protein, 44 aa, Artificial Sequence
  Quasi-synthetic sequence derived from human genome
ALARKAIQRRKWAVRIIRKFIKGFISRNKPLCPDNEEFIVFVRK

SEQ ID NO: 36705 - protein, 44 aa, Artificial Sequence
  Quasi-synthetic sequence derived from human genome
WKKYYEIVMLCGLLKMWEDLRLRVHGPFFPRILRRRKGKREFGK

SEQ ID NO: 36706 - protein, 44 aa, Artificial Sequence
  Quasi-synthetic sequence derived from human genome
RSLALALLCLVLSTCVGPYLFPYFIPLNGDRLLRNKKRKARWLR

SEQ ID NO: 36707 - protein, 44 aa, Artificial Sequence
  Quasi-synthetic sequence derived from human genome
IQVRCRAYYQGKMQREKYLTILKAVKVLQASFRGVRVRRTLRKM

SEQ ID NO: 36708 - protein, 44 aa, Artificial Sequence
  Quasi-synthetic sequence derived from human genome
IFPSRMAQTIMKARLKGAQTGRNLLKKKSDALTLRFRQILKKII

SEQ ID NO: 36709 - protein, 44 aa, Artificial Sequence
  Quasi-synthetic sequence derived from human genome
RAVILHFFRGLLYWKNTLALAAILVLLRVRQCLSLRPAPAMRVA

SEQ ID NO: 36710 - protein, 44 aa, Artificial Sequence
  Quasi-synthetic sequence derived from human genome
RRRARSSVCRRKVAQAREKRFTFVLAVVMGVFVLCWFPFFFSYS

SEQ ID NO: 36711 - protein, 44 aa, Artificial Sequence
  Quasi-synthetic sequence derived from human genome
KPVTLSRSKINKTKVLKMIFVHLIIFCFCFVPYNINLILYSLVR

SEQ ID NO: 36712 - protein, 44 aa, Artificial Sequence
  Quasi-synthetic sequence derived from human genome
KKFPHWLDKWMLTRKQFGLLSFFFAVLHAIYSLSYPMRRSYRYK

SEQ ID NO: 36713 - protein, 44 aa, Artificial Sequence
  Quasi-synthetic sequence derived from human genome
ALLRKRRYHAALAVLKGFRNGAVYGAKIRAPHALVMTFLFRNGR

SEQ ID NO: 36714 - protein, 44 aa, Artificial Sequence
  Quasi-synthetic sequence derived from human genome
LFLILLATAVILGSAVLLFHFCIFHRRKMKAIRRSLKEYVEKKL

SEQ ID NO: 36715 - protein, 44 aa, Artificial Sequence
  Quasi-synthetic sequence derived from human genome
VRQAHGSWFRLSFVYNHYLFFACILVVLLAIFLYLLRLRRIHHR

SEQ ID NO: 36716 - protein, 44 aa, Artificial Sequence
  Quasi-synthetic sequence derived from human genome
ALRGAPRLLSRVQPRAPCLRRLWGRGARPEVAGRRRAWAWGWRR

SEQ ID NO: 36717 - protein, 44 aa, Artificial Sequence
  Quasi-synthetic sequence derived from human genome
KLMRIKFQKILEERDALILIQWNIRAFMAVKNWPWMRLFFKIKP

SEQ ID NO: 36718 - protein, 44 aa, Artificial Sequence
  Quasi-synthetic sequence derived from human genome
LRCVRLLRIFKITRYWNSLSNLVASLLNSVRSIASLLLLLFLFI

SEQ ID NO: 36719 - protein, 44 aa, Artificial Sequence
  Quasi-synthetic sequence derived from human genome
RPLTYRAKRTPKRAGIMIGLAWLISFILWAPAILCWQYLVGKRT

SEQ ID NO: 36720 - protein, 44 aa, Artificial Sequence
  Quasi-synthetic sequence derived from human genome
RPFSGRRLPVRAWADVRRESRLLQLLGRLPLFGLGRLVTRKSWL

SEQ ID NO: 36721 - protein, 44 aa, Artificial Sequence
  Quasi-synthetic sequence derived from human genome
GVLGVVLLLLLLFYVVRYCWLRRQAALQRRLSAMEKGKLHKPGK

SEQ ID NO: 36722 - protein, 44 aa, Artificial Sequence
  Quasi-synthetic sequence derived from human genome
RYRVLVHPMASRRQQRRRQARVTCVLIWVVGGLLSIPTFLLRSI

SEQ ID NO: 36723 - protein, 44 aa, Artificial Sequence
  Quasi-synthetic sequence derived from human genome
FWVKVASCWACVLLYLGLLLAPLCWPPTQKPQPLILRRRRHRII

SEQ ID NO: 36724 - protein, 44 aa, Artificial Sequence
  Quasi-synthetic sequence derived from human genome
KKFVIKPIDKKAPDFVFYAPRLRINKRILALCMGNHELYMRRRK

SEQ ID NO: 36725 - protein, 44 aa, Artificial Sequence
  Quasi-synthetic sequence derived from human genome
VRRRRRRPGGRVPKDRPSLTVTPKRWKLRARPSLTVTPRRLGLR

SEQ ID NO: 36726 - protein, 44 aa, Artificial Sequence
  Quasi-synthetic sequence derived from human genome
TFKERLKLFFIKNQRSSLRIRLFNFSLKLLSCLLYIIRVLLENP

SEQ ID NO: 36727 - protein, 44 aa, Artificial Sequence
  Quasi-synthetic sequence derived from human genome
LRRLPCRKRFVKNNSSQRTQKQKERILMQRKKREVLARRKYALL

SEQ ID NO: 36728 - protein, 44 aa, Artificial Sequence
  Quasi-synthetic sequence derived from human genome
QLINWFICSLCVPRVRKLWSSRRPRTRRNLLLGTACAIYLGFLV

SEQ ID NO: 36729 - protein, 44 aa, Artificial Sequence
  Quasi-synthetic sequence derived from human genome
LRALLVVVNALLRKRRYHAALAVLKGFRNGAVYGAKIRAPHALV

SEQ ID NO: 36730 - protein, 44 aa, Artificial Sequence
  Quasi-synthetic sequence derived from human genome
RSLLRLLAAAAACGAFAFLGYCIYLNRKRRGDPAFKRRLRDKRR

SEQ ID NO: 36731 - protein, 44 aa, Artificial Sequence
  Quasi-synthetic sequence derived from human genome
ARRFRRWLNRYSYTVLSSWPERALISLKNRSRFLVRPNTRNRAF

SEQ ID NO: 36732 - protein, 44 aa, Artificial Sequence
  Quasi-synthetic sequence derived from human genome
RMLLRILPQSFGFIVPLLIMLFCYGFTLRTLFKAHMGQKHRAMR

SEQ ID NO: 36733 - protein, 44 aa, Artificial Sequence
  Quasi-synthetic sequence derived from human genome
RLRVKAVTKIREFILQKIYSFRKPMTNYQIPQTALLKYRFFYQF

SEQ ID NO: 36734 - protein, 44 aa, Artificial Sequence
  Quasi-synthetic sequence derived from human genome
RMKHLKTLPMVPFKTKDSPGVFSKLGVLLRRVTRNLVRNKLAVI

SEQ ID NO: 36735 - protein, 44 aa, Artificial Sequence
  Quasi-synthetic sequence derived from human genome
VKGLQLPTPVWFHVLFYLAVGIMFLVNTVLWVTIRKELKRKKKW

SEQ ID NO: 36736 - protein, 44 aa, Artificial Sequence
  Quasi-synthetic sequence derived from human genome
ITVKRISTRGRKCKPIFVQIARQVVKLNASDLRLPSRAWKVKLV

SEQ ID NO: 36737 - protein, 44 aa, Artificial Sequence
  Quasi-synthetic sequence derived from human genome
IIHRLRRRGRSGLQPRVGKSTAILLGITTLFTLLWAPRVFVMLY

SEQ ID NO: 36738 - protein, 44 aa, Artificial Sequence
  Quasi-synthetic sequence derived from human genome
VARLWGIRKNKPNMNYDKLSRALRYYYVKNIIKKVNGQKFVYKF

SEQ ID NO: 36739 - protein, 44 aa, Artificial Sequence
  Quasi-synthetic sequence derived from human genome
KIAKRYSSIPQMWSRCLLRHCYGLWFICLPAYVKVCHSKVRALK

SEQ ID NO: 36740 - protein, 44 aa, Artificial Sequence
  Quasi-synthetic sequence derived from human genome
LKKGVFNKSRCTICSKLAEVWIFIPKLLFRLTVIILTFKCYYVL

SEQ ID NO: 36741 - protein, 44 aa, Artificial Sequence
  Quasi-synthetic sequence derived from human genome
VFFNIPQIQYKNPWVQIMMFKNMTPSPFLRFYLGKPSGKRRRRK

SEQ ID NO: 36742 - protein, 44 aa, Artificial Sequence
  Quasi-synthetic sequence derived from human genome
WLRRRRARGIPPGPTPWPLVGNFGHVLLPPFLRRRSWLSSRTRA

SEQ ID NO: 36743 - protein, 44 aa, Artificial Sequence
  Quasi-synthetic sequence derived from human genome
MIGVMSGGILIYKNRVRMNTFPWLKIVKISFKCKQFFIQLRKEL

SEQ ID NO: 36744 - protein, 44 aa, Artificial Sequence
  Quasi-synthetic sequence derived from human genome
ASHCLAYANSCLNPLVYALASRHFRARFRRLWPCGRRRRHRARR

SEQ ID NO: 36745 - protein, 44 aa, Artificial Sequence
  Quasi-synthetic sequence derived from human genome
FAKTWRVHAIFKNVKMKKKIIKDQKLLVIVGGMLLIDLCILICW

SEQ ID NO: 36746 - protein, 44 aa, Artificial Sequence
  Quasi-synthetic sequence derived from human genome
KKSKVHYHVAVIINYLGHCISLVALLVAFVLFLRLRSIRCLRNI

SEQ ID NO: 36747 - protein, 44 aa, Artificial Sequence
  Quasi-synthetic sequence derived from human genome
KVVRKADRSRTSILIICILITGLGIISVISHLTKRRRSQRNRRV

SEQ ID NO: 36748 - protein, 44 aa, Artificial Sequence
  Quasi-synthetic sequence derived from human genome
RGHRKRSRRVLYPRVVRRQLPVEEPNPAKRLLFLLLTIVFCQIL

SEQ ID NO: 36749 - protein, 44 aa, Artificial Sequence
  Quasi-synthetic sequence derived from human genome
LLTFHLSTPRSHHLYHARLWLHVLPTLPGTLCLRIFRWGPRRRR

SEQ ID NO: 36750 - protein, 44 aa, Artificial Sequence
  Quasi-synthetic sequence derived from human genome
LLCLHRTLTSWLRVRFGTWNWIWRRCCRAASAAVLAPLGFTLRK

SEQ ID NO: 36751 - protein, 44 aa, Artificial Sequence
  Quasi-synthetic sequence derived from human genome
IKMQKTIRMWLCKRRHKPRIDGLVKVGTLKKRLDKFNEVVSVLK

SEQ ID NO: 36752 - protein, 44 aa, Artificial Sequence
  Quasi-synthetic sequence derived from human genome
KRCKKLEAVYKEFELQKVCYLPLNTFLLKPIQRLLHYRLLLRRL

SEQ ID NO: 36753 - protein, 44 aa, Artificial Sequence
  Quasi-synthetic sequence derived from human genome
LAARRQEQRATVRALWFWAFSLQAKVWATWLAFVLERRRKKARL

SEQ ID NO: 36754 - protein, 44 aa, Artificial Sequence
  Quasi-synthetic sequence derived from human genome
LTRKGIVRVVFFPFFFRWWLQVTSKVIFFWLLVLYLLQVAAIVL

SEQ ID NO: 36755 - protein, 44 aa, Artificial Sequence
  Quasi-synthetic sequence derived from human genome
ILFRATRKPLSGRTPRLVYKWFLLIYKLSYAFGVVGYLAIMFTM

SEQ ID NO: 36756 - protein, 44 aa, Artificial Sequence
  Quasi-synthetic sequence derived from human genome
LRGVRAVRPKVLMRLSKTKKHVSRAYGGSMCAKCVRDRIKRAFL

SEQ ID NO: 36757 - protein, 44 aa, Artificial Sequence
  Quasi-synthetic sequence derived from human genome
PRSLLQSLSRLQKPRAFILKSKGIKQKQIIPKNLLDSKSLKLII

SEQ ID NO: 36758 - protein, 44 aa, Artificial Sequence
  Quasi-synthetic sequence derived from human genome
LLVLLLVALSALFLGRWLVVRLATKWCQRKLQAELKIGSFRFFW

SEQ ID NO: 36759 - protein, 44 aa, Artificial Sequence
  Quasi-synthetic sequence derived from human genome
VLGNLRSLLQILRQDMTPGGGPGARRRQRGRLMRRLVRRLRRWG

SEQ ID NO: 36760 - protein, 44 aa, Artificial Sequence
  Quasi-synthetic sequence derived from human genome
AKWRMVLRILPHTFGFIVPLFVMLFCYGFTLRTLFKAHMGQKHR

SEQ ID NO: 36761 - protein, 44 aa, Artificial Sequence
  Quasi-synthetic sequence derived from human genome
YVYKIGIYGWRKRCLYLFVLLLLIILVVNLALTIWILKVMWFSP

SEQ ID NO: 36762 - protein, 44 aa, Artificial Sequence
  Quasi-synthetic sequence derived from human genome
FKAKVKRRPEMSRGLLAVRGAFVGASLLFLLVNVLCAVLSHRRR

SEQ ID NO: 36763 - protein, 44 aa, Artificial Sequence
  Quasi-synthetic sequence derived from human genome
LLSVLAMFFLLVLILSSVFLFRLFKRRQGRIFPEGKMWKLTFSP

SEQ ID NO: 36764 - protein, 44 aa, Artificial Sequence
  Quasi-synthetic sequence derived from human genome
FHFNRYLTRRRRIEIANALCLTERQIKIWFQNRRMKWKKENKLI

SEQ ID NO: 36765 - protein, 44 aa, Artificial Sequence
  Quasi-synthetic sequence derived from human genome
LRALLLWGRRLRPLLRAPALAAVPGGKPILCPRRTTAQLGPRRN

SEQ ID NO: 36766 - protein, 44 aa, Artificial Sequence
  Quasi-synthetic sequence derived from human genome
TFGFKVAVIASIVSCAIILLMSMAFLTCCLLKCVKKSKRRRSNR

SEQ ID NO: 36767 - protein, 44 aa, Artificial Sequence
  Quasi-synthetic sequence derived from human genome
NIKHITSKINAILAHNSPVLIVQRWIRGFLVRKNLSPVFFHKKK

SEQ ID NO: 36768 - protein, 44 aa, Artificial Sequence
  Quasi-synthetic sequence derived from human genome
TKHSRKVNPSTKYLVISLVILSFLFLLSVIVIFIIHVYQKIKYR

SEQ ID NO: 36769 - protein, 44 aa, Artificial Sequence
  Quasi-synthetic sequence derived from human genome
IFLIVETRIDSEVYKTARALRIVRFTKILSLLRLLRLSRLIRYI

SEQ ID NO: 36770 - protein, 44 aa, Artificial Sequence
  Quasi-synthetic sequence derived from human genome
RLKKVVKWYLSGFYKKPKGLKKPYNPILGETFRCLWIHPRTNSK

SEQ ID NO: 36771 - protein, 44 aa, Artificial Sequence
  Quasi-synthetic sequence derived from human genome
RVVHLQLLRRHTLRAAERNVRRKKVSFQLERIIKKQRLLEAQKR

SEQ ID NO: 36772 - protein, 44 aa, Artificial Sequence
  Quasi-synthetic sequence derived from human genome
FRQRIILRVWWSTWRQRLGQVRVSRALHASALKHRALSLQVQAW

SEQ ID NO: 36773 - protein, 44 aa, Artificial Sequence
  Quasi-synthetic sequence derived from human genome
RLLQAAPAAAPRALLPQWPRRPGRRWPASPLGMKVFRRKALVLC

SEQ ID NO: 36774 - protein, 44 aa, Artificial Sequence
  Quasi-synthetic sequence derived from human genome
KVRAKETRKRALSRLKLKLNKDIVISVGIYNLVQKALKPPPIKL

SEQ ID NO: 36775 - protein, 44 aa, Artificial Sequence
  Quasi-synthetic sequence derived from human genome
LFRKPQRSFFGKLLREFRLVAADRRSWKILLFGVINLICTGFLL

SEQ ID NO: 36776 - protein, 44 aa, Artificial Sequence
  Quasi-synthetic sequence derived from human genome
HRFRRSRSPMHYMYRPRSRSPRICHRFISRYRSRSRSRSPYRIR

SEQ ID NO: 36777 - protein, 44 aa, Artificial Sequence
  Quasi-synthetic sequence derived from human genome
RFIKYFVKGRQAVLSMVRKAKYRELLLSELLGRRAPVVVRLGLT

SEQ ID NO: 36778 - protein, 44 aa, Artificial Sequence
  Quasi-synthetic sequence derived from human genome
RKFKFRKMHYDRFVIFLMPHIGCIVMALSKYLMMFQIYCKVCIP

SEQ ID NO: 36779 - protein, 44 aa, Artificial Sequence
  Quasi-synthetic sequence derived from human genome
ARMARKAGNFYVPAEPKLAFVIRIRGINGVSPKVRKVLQLLRLR

SEQ ID NO: 36780 - protein, 44 aa, Artificial Sequence
  Quasi-synthetic sequence derived from human genome
VRPWKRAAILNYTKGLYFQAFGGRRRCLSKSVAPLLAHGYRRFL

SEQ ID NO: 36781 - protein, 44 aa, Artificial Sequence
  Quasi-synthetic sequence derived from human genome
RHGRTAYLQLYATLLLLLIVSVLACNFSVILNLIRMHRRSRRSR

SEQ ID NO: 36782 - protein, 44 aa, Artificial Sequence
  Quasi-synthetic sequence derived from human genome
LPVGIIAGATIGASILLIFFFIALVFFLYRRRKGSRKDVTLRKL

SEQ ID NO: 36783 - protein, 44 aa, Artificial Sequence
  Quasi-synthetic sequence derived from human genome
ILVWKNWLGVKRQPLWTLVLILWPVIIFIILAITRTKFPPTAKP

SEQ ID NO: 36784 - protein, 44 aa, Artificial Sequence
  Quasi-synthetic sequence derived from human genome
VRSSVHARWIVGKVIGTKMQKTAKVRVTRLVLDPYLLKYFNKRK

SEQ ID NO: 36785 - protein, 44 aa, Artificial Sequence
  Quasi-synthetic sequence derived from human genome
FFILRRKPVEQKKIFTIQGCYPVIRCLLRRRGWVEKKMVHRSGP

SEQ ID NO: 36786 - protein, 44 aa, Artificial Sequence
  Quasi-synthetic sequence derived from human genome
LDHKPRVTNIFPKQKYLSKKTTKRKRGYIKNKLVFKKGKKISKK

SEQ ID NO: 36787 - protein, 44 aa, Artificial Sequence
  Quasi-synthetic sequence derived from human genome
FTRGSRGRKNSRTMLLPLLRRFPEQVRVSLFHTPHLRGLLRLLI

SEQ ID NO: 36788 - protein, 44 aa, Artificial Sequence
  Quasi-synthetic sequence derived from human genome
ILCLLVVRFDPASPSSLHFLYKLAQLFRWIRKAAFSRLYQLRIR

SEQ ID NO: 36789 - protein, 44 aa, Artificial Sequence
  Quasi-synthetic sequence derived from human genome
RKRRRQLRASVFALALPLSLGPCWALWVAVPKASATIRGPQRRL

SEQ ID NO: 36790 - protein, 44 aa, Artificial Sequence
  Quasi-synthetic sequence derived from human genome
KKIWQKQFRWPKNRLQILKFCKAREDLLKIQKERDFHRMHHKRI

SEQ ID NO: 36791 - protein, 44 aa, Artificial Sequence
  Quasi-synthetic sequence derived from human genome
QRKWRAILPAKIAHEHFLMIKRHRAACLIQAHYRGYKGRQVFLR

SEQ ID NO: 36792 - protein, 44 aa, Artificial Sequence
  Quasi-synthetic sequence derived from human genome
FKTCKEYLRPLKKFLRKLHLPRDLPQKKKLKYMKQSLVVLGDHI

SEQ ID NO: 36793 - protein, 44 aa, Artificial Sequence
  Quasi-synthetic sequence derived from human genome
LHPSVRQRCLIQQKRRRHRATRKIGIAIATFLICFAPYVMTRLA

SEQ ID NO: 36794 - protein, 44 aa, Artificial Sequence
  Quasi-synthetic sequence derived from human genome
WRQALLAGLFASLGLVALLAALVCNTLSGLALLRARWRRRSRRP

SEQ ID NO: 36795 - protein, 44 aa, Artificial Sequence
  Quasi-synthetic sequence derived from human genome
RRRKSLWLALSASWLLLVLLGGFSLLRLALPPRPRPGASQGWPR

SEQ ID NO: 36796 - protein, 44 aa, Artificial Sequence
  Quasi-synthetic sequence derived from human genome
AGCVIFLLIIIFLTVLLLKLRKRHRKHTQQRAAALSLSTLASPK

SEQ ID NO: 36797 - protein, 44 aa, Artificial Sequence
  Quasi-synthetic sequence derived from human genome
ISSILGSVWLAYKTPKLLRTARGRRIKKCATQLCRRCKTVCQFR

SEQ ID NO: 36798 - protein, 44 aa, Artificial Sequence
  Quasi-synthetic sequence derived from human genome
FLWFRSKQEALKQGWLHKKGGGSSTLSRRNWKKRWFVLRQSKLM

SEQ ID NO: 36799 - protein, 44 aa, Artificial Sequence
  Quasi-synthetic sequence derived from human genome
PPKRRKKRYLRHDKPPYTYLAMIALVIQAAPSRRLKLAQIIRQV

SEQ ID NO: 36800 - protein, 44 aa, Artificial Sequence
  Quasi-synthetic sequence derived from human genome
IQRCYRKYKQLTWIALKFALYKKMTQAAILIQSKFRSYYEQKRF

SEQ ID NO: 36801 - protein, 44 aa, Artificial Sequence
  Quasi-synthetic sequence derived from human genome
RVIGKAGRNRWLGKRPNSGRWHRKGGWAGRKIRPLPPMKSYVKL

SEQ ID NO: 36802 - protein, 44 aa, Artificial Sequence
  Quasi-synthetic sequence derived from human genome
STVMRLRTKMPWKTCWRYLTSGGFFLLILMIFSKLLKHSVIVAI

SEQ ID NO: 36803 - protein, 44 aa, Artificial Sequence
  Quasi-synthetic sequence derived from human genome
RRNVNQTRLKRVLSGATLPDKLRDKLKLMKQRRKPPGFLALVKL

SEQ ID NO: 36804 - protein, 44 aa, Artificial Sequence
  Quasi-synthetic sequence derived from human genome
RFLLRVRCWQYRQLSALHRAPRPTRPDKARRLGYKAKQGYVIYR

SEQ ID NO: 36805 - protein, 44 aa, Artificial Sequence
  Quasi-synthetic sequence derived from human genome
RSLTDAVPLSVLILGLLIMFITIVFCAAGIVVLVLHRRRRYKKK

SEQ ID NO: 36806 - protein, 44 aa, Artificial Sequence
  Quasi-synthetic sequence derived from human genome
MKPPISRAKMILITKAAIKAIKLYKHVVQIVEKFIKKCKPEYKV

SEQ ID NO: 36807 - protein, 44 aa, Artificial Sequence
  Quasi-synthetic sequence derived from human genome
LKRFKVMKPKVLRSWCRQILKGLQFLHTRTPPIIHRDLKCDNIF

SEQ ID NO: 36808 - protein, 44 aa, Artificial Sequence
  Quasi-synthetic sequence derived from human genome
PIRRSVQISVLLPAVNIRRRIKLTFPQPARPRAPRSLCLWQTWF

SEQ ID NO: 36809 - protein, 44 aa, Artificial Sequence
  Quasi-synthetic sequence derived from human genome
LKVARALTLLRFELLPDPTRIPIPMARLVLKSKNGIHLRLRRLP

SEQ ID NO: 36810 - protein, 44 aa, Artificial Sequence
  Quasi-synthetic sequence derived from human genome
KRRPSRLVALREQKALKTLGIIMGVFTLCWLPFFLANVVKAFHR

SEQ ID NO: 36811 - protein, 44 aa, Artificial Sequence
  Quasi-synthetic sequence derived from human genome
KLVSPKWKNFKGLKLQWRDKIRLNNAIWRAWYMQYLEKRKNPVC

SEQ ID NO: 36812 - protein, 44 aa, Artificial Sequence
  Quasi-synthetic sequence derived from human genome
MKFLRPLRVLSQFERMKVVVRALIKTTLPTLNVFLVCLMIWLIF

SEQ ID NO: 36813 - protein, 44 aa, Artificial Sequence
  Quasi-synthetic sequence derived from human genome
LAKKIKIFFALAPVVTVKYTQSPMKKLTTLSRRVVKVLFGDKMF

SEQ ID NO: 36814 - protein, 44 aa, Artificial Sequence
  Quasi-synthetic sequence derived from human genome
KHVRKNYMKFKAKFSLIQFHRIIESAILSFTSLIKHLNLHKISK

SEQ ID NO: 36815 - protein, 44 aa, Artificial Sequence
  Quasi-synthetic sequence derived from human genome
IFLIVEKGIDSEVYKTARALRIVRFTKILSLLRLLRLSRLIRYI

SEQ ID NO: 36816 - protein, 44 aa, Artificial Sequence
  Quasi-synthetic sequence derived from human genome
KNLFYRTYMLFKNASGKRRFLLCLLLFTVITYFFVVIGIAPIFI

SEQ ID NO: 36817 - protein, 44 aa, Artificial Sequence
  Quasi-synthetic sequence derived from human genome
RILLLFKPPKYHPDVPYVKRVKTWRMHLFTGIQIICLAVLWVVK

SEQ ID NO: 36818 - protein, 44 aa, Artificial Sequence
  Quasi-synthetic sequence derived from human genome
PWGLRLPQKFLFLLFLSGLVTLCFGALFLLPHSSRLKRLFLAPR

SEQ ID NO: 36819 - protein, 44 aa, Artificial Sequence
  Quasi-synthetic sequence derived from human genome
HHTFYIRSYILNKDLLRKALILMNSKHTHLILCVLRFMRRMICL

SEQ ID NO: 36820 - protein, 44 aa, Artificial Sequence
  Quasi-synthetic sequence derived from human genome
FKVKMTQKKEVTLPFLFTPFKLLSDSKQFNILRKARSYIKHRKF

SEQ ID NO: 36821 - protein, 44 aa, Artificial Sequence
  Quasi-synthetic sequence derived from human genome
QKGPLCSPITLGLLVAGVLVLLVSLGVAIHLCCRRRRARLRFMK

SEQ ID NO: 36822 - protein, 44 aa, Artificial Sequence
  Quasi-synthetic sequence derived from human genome
IIYPCSSKEFKRAFVRILGCQCRGRGRRRRRRRRRLGGCAYTYR

SEQ ID NO: 36823 - protein, 44 aa, Artificial Sequence
  Quasi-synthetic sequence derived from human genome
KQNIVARKIVKMTKQPAKKKPPPSREKKVTRTILAILLAFIITW

SEQ ID NO: 36824 - protein, 44 aa, Artificial Sequence
  Quasi-synthetic sequence derived from human genome
RRHVRAARPVPWNALLRRRARGPPAAVLACLLPDRALRTRLVRG

SEQ ID NO: 36825 - protein, 44 aa, Artificial Sequence
  Quasi-synthetic sequence derived from human genome
LSIFTLVISLGIFVFFRKLTTIFPLNWKYRKALSLGCQRVTLHK

SEQ ID NO: 36826 - protein, 44 aa, Artificial Sequence
  Quasi-synthetic sequence derived from human genome
KKFVIKPIDKKAPDFVFYAPRLRINKRILQLCMGNHELYMRRRK

SEQ ID NO: 36827 - protein, 44 aa, Artificial Sequence
  Quasi-synthetic sequence derived from human genome
FKLQEQRRKSLRGRERVLSILRGVPHGKGRAIRLGVLKSPLKKL

SEQ ID NO: 36828 - protein, 44 aa, Artificial Sequence
  Quasi-synthetic sequence derived from human genome
KKLLNGLCPKITYLFYKLFTLLSWMLSVVLLLFLNVKIALFLLL

SEQ ID NO: 36829 - protein, 44 aa, Artificial Sequence
  Quasi-synthetic sequence derived from human genome
LRCVRLLRIFKVTRHWASLSNLVASLLNSMKSIASLLLLLFLFI

SEQ ID NO: 36830 - protein, 44 aa, Artificial Sequence
  Quasi-synthetic sequence derived from human genome
PLKSSVGSRRGFFTKLPPAERRYFKRVVLAARTKRGHLVLKSFK

SEQ ID NO: 36831 - protein, 44 aa, Artificial Sequence
  Quasi-synthetic sequence derived from human genome
WRGYWLRQKLISQMMAAKAIQEAWRRFNKRHILHSSKSLVKKTR

SEQ ID NO: 36832 - protein, 44 aa, Artificial Sequence
  Quasi-synthetic sequence derived from human genome
PFLNPFKKIKDHLLLIKKVTWTMNGLMLPTDIKRRKTKPVLSIR

SEQ ID NO: 36833 - protein, 44 aa, Artificial Sequence
  Quasi-synthetic sequence derived from human genome
PRTPMSWSRIKKILKEGPMLKNCNSFKRWKLRYFLVQGQKLYFA

SEQ ID NO: 36834 - protein, 44 aa, Artificial Sequence
  Quasi-synthetic sequence derived from human genome
ARIVRALFEIALRKRWPTMTYRLLNLSKVIDKRLWGWASPLRQF

SEQ ID NO: 36835 - protein, 44 aa, Artificial Sequence
  Quasi-synthetic sequence derived from human genome
WLKMRISKLVPWMILGSLLYVSMICVFHSKYAGFMVPYFLRKFF

SEQ ID NO: 36836 - protein, 44 aa, Artificial Sequence
  Quasi-synthetic sequence derived from human genome
FLLKHVRRNKLGYVSVKLLTSFKKVKHLTRDWRTTAHALKYSVV

SEQ ID NO: 36837 - protein, 44 aa, Artificial Sequence
  Quasi-synthetic sequence derived from human genome
IRCNTTIRKSGFGGITMLFTGYFVLCCSWSFRRLKKLCRPLPWK

SEQ ID NO: 36838 - protein, 44 aa, Artificial Sequence
  Quasi-synthetic sequence derived from human genome
MKKKTFKGLIRIFRKGVIAVLAANRLKILGQSCASLFTWMESFK

SEQ ID NO: 36839 - protein, 44 aa, Artificial Sequence
  Quasi-synthetic sequence derived from human genome
PLHRPSWATWLDFLILKVAVGTRLHRVPVKIKRMCVNGLCRARK

SEQ ID NO: 36840 - protein, 44 aa, Artificial Sequence
  Quasi-synthetic sequence derived from human genome
KIRSRKLGIFRRCWLVFKKASSKGPRRLEKFPDEKAAYFRNFHK

SEQ ID NO: 36841 - protein, 44 aa, Artificial Sequence
  Quasi-synthetic sequence derived from human genome
VWQDEKRRPKRREIPLKVLVKAVLFACMLMRKTMASRVRVTILF

SEQ ID NO: 36842 - protein, 44 aa, Artificial Sequence
  Quasi-synthetic sequence derived from human genome
LRTFRLMRVLKLVRFLPALQRQLVVLMKTMDNVATFCMLLMLFI

SEQ ID NO: 36843 - protein, 44 aa, Artificial Sequence
  Quasi-synthetic sequence derived from human genome
RTGCKFKFFFQRNPYFRNKLIVKVYEVRSFGQVVSFSTLIMWRR

SEQ ID NO: 36844 - protein, 44 aa, Artificial Sequence
  Quasi-synthetic sequence derived from human genome
LRGKFKRPPLRRVRMSADAMLKALLGSKHKVCMDLRANLKQVKK

SEQ ID NO: 36845 - protein, 44 aa, Artificial Sequence
  Quasi-synthetic sequence derived from human genome
LKLFLSRRRWQRSQISYKCHLVLRPIPELLRAPPERVWVTMPRR

SEQ ID NO: 36846 - protein, 44 aa, Artificial Sequence
  Quasi-synthetic sequence derived from human genome
AFWKKIIAYQQKLLNYFARNFYNMRMLALFVAFAINFILLFYKV

SEQ ID NO: 36847 - protein, 44 aa, Artificial Sequence
  Quasi-synthetic sequence derived from human genome
PKCLYSRITVNTAFGTKFSHISFIILFKVFLFPRITISKKTKLV

SEQ ID NO: 36848 - protein, 44 aa, Artificial Sequence
  Quasi-synthetic sequence derived from human genome
CRKVSSIGRRYPRKRCICCFLLGLLLAVTATGLAFGTWKHARRY

SEQ ID NO: 36849 - protein, 44 aa, Artificial Sequence
  Quasi-synthetic sequence derived from human genome
FDALNFVTMLKMVWISKASAIQRKGRAGRCRPGICFRLFSRLRF

SEQ ID NO: 36850 - protein, 44 aa, Artificial Sequence
  Quasi-synthetic sequence derived from human genome
KVKCILKTPGKINCLRNCKTYQARKPLWFYNTSLKFFLNKPMLA

SEQ ID NO: 36851 - protein, 44 aa, Artificial Sequence
  Quasi-synthetic sequence derived from human genome
LTYLLLWVKQRKDLLHLCCKKLKILGMPFRNIRSILKMVNLDCI

SEQ ID NO: 36852 - protein, 44 aa, Artificial Sequence
  Quasi-synthetic sequence derived from human genome
KNLRRRKAHFQYLLNHRLQILSPVLPVSCRDPRHLRRLRDKLLS

SEQ ID NO: 36853 - protein, 44 aa, Artificial Sequence
  Quasi-synthetic sequence derived from human genome
FKLNKYLSRPKRFEVATSLMLTETQVKIWFQNRRMKWKRSKKAK

SEQ ID NO: 36854 - protein, 44 aa, Artificial Sequence
  Quasi-synthetic sequence derived from human genome
GLLKKLGIKLQVLINLGLVYKVQQHNGIIFQFVAFIKRRQRAVP

SEQ ID NO: 36855 - protein, 44 aa, Artificial Sequence
  Quasi-synthetic sequence derived from human genome
VARKFASIARNQVRKKRQMAARERKVTRTIFAILLAFILTWTPY

SEQ ID NO: 36856 - protein, 44 aa, Artificial Sequence
  Quasi-synthetic sequence derived from human genome
IKMTRILTAFKVVRTLKTGFGFTNVTAHQKWKFSRPGIRLLSVK

SEQ ID NO: 36857 - protein, 44 aa, Artificial Sequence
  Quasi-synthetic sequence derived from human genome
VCFLGVAVLVSILAGCLLNRRRAARRRRKRLRQDPPLIFSPTGK

SEQ ID NO: 36858 - protein, 44 aa, Artificial Sequence
  Quasi-synthetic sequence derived from human genome
FLITFLFGMVVLALVVWKIFTLSRATAVKERGKNRKKVLTLLGL

SEQ ID NO: 36859 - protein, 44 aa, Artificial Sequence
  Quasi-synthetic sequence derived from human genome
FSHFFYLSLFFWMLFKALLIIYGILVIFRRMMKSRMMVIGFAIG

SEQ ID NO: 36860 - protein, 44 aa, Artificial Sequence
  Quasi-synthetic sequence derived from human genome
KKTFIVLNKGKAISRFSATPALYILTPFNPIRKLAIKILVHSLF

SEQ ID NO: 36861 - protein, 44 aa, Artificial Sequence
  Quasi-synthetic sequence derived from human genome
KLSKIRVVRKSIARVLTVINQTQKENLRKFYKGKKYKPLDLRPK

SEQ ID NO: 36862 - protein, 44 aa, Artificial Sequence
  Quasi-synthetic sequence derived from human genome
LRRIHLFTLVQILCLAVLWILKSTVAAIIFPVMILGLIIVRRLL

SEQ ID NO: 36863 - protein, 44 aa, Artificial Sequence
  Quasi-synthetic sequence derived from human genome
QSGKHNKKLKKSIKIIFIVVAAFLVSWLPFNTFKFLAIVSGLRQ

SEQ ID NO: 36864 - protein, 44 aa, Artificial Sequence
  Quasi-synthetic sequence derived from human genome
FRKPYVRRRPSKRRGARAFRCIKPAPVIHPASVIFTVPATTVKI

SEQ ID NO: 36865 - protein, 44 aa, Artificial Sequence
  Quasi-synthetic sequence derived from human genome
PRKRYRRKLKKYGKNVGKVIIKGCRYVVIGLQGFAAAYSAPFAV

SEQ ID NO: 36866 - protein, 44 aa, Artificial Sequence
  Quasi-synthetic sequence derived from human genome
LIGKTHLTMALTVIAGLVVIFMMLGGTFLYWRGRRIQNKRAMRR

SEQ ID NO: 36867 - protein, 44 aa, Artificial Sequence
  Quasi-synthetic sequence derived from human genome
VYPLALYGFMVFFLINPTKTFYYKSRFWLLKLLFRVFTAPFHKV

SEQ ID NO: 36868 - protein, 44 aa, Artificial Sequence
  Quasi-synthetic sequence derived from human genome
GHLILWTLCSVLLPVFITFWCSLQRSRRQLHRRDIFRKSKHGWR

SEQ ID NO: 36869 - protein, 44 aa, Artificial Sequence
  Quasi-synthetic sequence derived from human genome
LRIRRLLRPFFLLQNSSMMKKTLKCIRWSLPEMASVGLLLAIHL

SEQ ID NO: 36870 - protein, 44 aa, Artificial Sequence
  Quasi-synthetic sequence derived from human genome
WIQYHSLDVIAFLLACVATMIFMITKCCLFCFRKLAKTGKKKKR

SEQ ID NO: 36871 - protein, 44 aa, Artificial Sequence
  Quasi-synthetic sequence derived from human genome
RLRGLRRAAAGTSRLLFQRLLPCGVIKFRYIWICWFAALAAGGA

SEQ ID NO: 36872 - protein, 44 aa, Artificial Sequence
  Quasi-synthetic sequence derived from human genome
CLSFHLLFGLEIRMRRIVFAGVILFRLLGVILFRLLGVILFGRL

SEQ ID NO: 36873 - protein, 44 aa, Artificial Sequence
  Quasi-synthetic sequence derived from human genome
WFRGNMQKKCYGKIKASVLLIQAFVRGWKARKNYRKYFRSEAAL

SEQ ID NO: 36874 - protein, 44 aa, Artificial Sequence
  Quasi-synthetic sequence derived from human genome
YFRMRKARQYYLKMYKAIIVIQNYYHAYKAQVNQRKNFLQVKKA

SEQ ID NO: 36875 - protein, 44 aa, Artificial Sequence
  Quasi-synthetic sequence derived from human genome
MIKQLAEITYDIFKKKAHKLTSAPLKQNFQKLLKLFYIKKLKPL

SEQ ID NO: 36876 - protein, 44 aa, Artificial Sequence
  Quasi-synthetic sequence derived from human genome
DGRHPRVFAWVYRHQARHKAVVLRCHAVLLARAHKARALARLLR

SEQ ID NO: 36877 - protein, 44 aa, Artificial Sequence
  Quasi-synthetic sequence derived from human genome
ILVLCLRLLQSRCPRVLPKKLQNWNFLPLWMRSLKPWDAVVSKF

SEQ ID NO: 36878 - protein, 44 aa, Artificial Sequence
  Quasi-synthetic sequence derived from human genome
KIIKAVICAGLYPKVAKIRLNLGKKRKMVKVYTKTDGLVAVHPK

SEQ ID NO: 36879 - protein, 44 aa, Artificial Sequence
  Quasi-synthetic sequence derived from human genome
KLRNLFTKFIRKFGFELVKRLLPEEYHRVLVNIRKAEARAKRHR

SEQ ID NO: 36880 - protein, 44 aa, Artificial Sequence
  Quasi-synthetic sequence derived from human genome
SVRRKALDLLNNKLQQNISWKKTIVTRFLKLVPDLLAIVQRKKK

SEQ ID NO: 36881 - protein, 44 aa, Artificial Sequence
  Quasi-synthetic sequence derived from human genome
IVYKLRRKSNFRLRGYSTGKTTAILFTITSIFATLWAPRIIMIL

SEQ ID NO: 36882 - protein, 44 aa, Artificial Sequence
  Quasi-synthetic sequence derived from human genome
FLLAGLIGGAVIFVLVVLLSVFCWHMHKKGRYTSQKWKYNRGRR

SEQ ID NO: 36883 - protein, 44 aa, Artificial Sequence
  Quasi-synthetic sequence derived from human genome
KPFPILQATFIFSDHIRCIIAKQRLAKGRIQARRMKMQRIAALL

SEQ ID NO: 36884 - protein, 44 aa, Artificial Sequence
  Quasi-synthetic sequence derived from human genome
WWAYAIHGVLEVNVCPRLWMWSWKHIRKHRQKVKQYKELYKKKL

SEQ ID NO: 36885 - protein, 44 aa, Artificial Sequence
  Quasi-synthetic sequence derived from human genome
LKSNWLGLRFLRALRLLELPQILQILRAIKTSNSVKFSKLLSII

SEQ ID NO: 36886 - protein, 44 aa, Artificial Sequence
  Quasi-synthetic sequence derived from human genome
KSKIFFLFRLCKKLPFNMMSWLNFSIRTEIRNLSVFLALPCKFT

SEQ ID NO: 36887 - protein, 44 aa, Artificial Sequence
  Quasi-synthetic sequence derived from human genome
ILIICILITGLGIISVISHLTKRRRSQRNRRVGNTLKPFSRVLT

SEQ ID NO: 36888 - protein, 44 aa, Artificial Sequence
  Quasi-synthetic sequence derived from human genome
VRKAGALAVKNFLVHKKNKKVESATRRKWKHYWVSLKGCTLFFY

SEQ ID NO: 36889 - protein, 44 aa, Artificial Sequence
  Quasi-synthetic sequence derived from human genome
ARGIIRFVIGFSLPMSIVAICYGLIAAKIHKKGMIKSSRPLRVL

SEQ ID NO: 36890 - protein, 44 aa, Artificial Sequence
  Quasi-synthetic sequence derived from human genome
CARVRKLRSAGRCGKFHQVRRVMTILFLTMVISYFGCMKAAPMK

SEQ ID NO: 36891 - protein, 44 aa, Artificial Sequence
  Quasi-synthetic sequence derived from human genome
RGKNPLLVPLLYDFRRMTARRRVNRKMGFHVIYKTPCGLCLRTM

SEQ ID NO: 36892 - protein, 44 aa, Artificial Sequence
  Quasi-synthetic sequence derived from human genome
TTIQKHVRGWMARRHFQRLRDAAIVIQCAFRMLKARRELKALRI

SEQ ID NO: 36893 - protein, 44 aa, Artificial Sequence
  Quasi-synthetic sequence derived from human genome
LKAVHIVQFIFILKLGTAFFMVLFQKPFSSGKTITKHQWIKIFK

SEQ ID NO: 36894 - protein, 44 aa, Artificial Sequence
  Quasi-synthetic sequence derived from human genome
PNRARRKKSSARKFGLQKLWEWCLGLVQMSSLPWRVVIGRLGRI

SEQ ID NO: 36895 - protein, 44 aa, Artificial Sequence
  Quasi-synthetic sequence derived from human genome
CALFLLLLLLGTIATIVFFCCWHRKLQKGRHPMKSVFSGRSRSR

SEQ ID NO: 36896 - protein, 44 aa, Artificial Sequence
  Quasi-synthetic sequence derived from human genome
KLKKITKTVQQRYWAMKERNIQFQRYNKLRHSVIYIQAIFRGKK

SEQ ID NO: 36897 - protein, 44 aa, Artificial Sequence
  Quasi-synthetic sequence derived from human genome
VLKRLGFKGVWKGLFARIIMIGTLTALQWFIYDSVKVYFRLPRP

SEQ ID NO: 36898 - protein, 44 aa, Artificial Sequence
  Quasi-synthetic sequence derived from human genome
MRASRILHGLGFTPAMQRKKLKDFSGGWRMRVALARALFIRPFM

SEQ ID NO: 36899 - protein, 44 aa, Artificial Sequence
  Quasi-synthetic sequence derived from human genome
DFPARWSFRAYTSVLYFNPWMRIFIQAKRVKTKHLCYCLYRPRK

SEQ ID NO: 36900 - protein, 44 aa, Artificial Sequence
  Quasi-synthetic sequence derived from human genome
LARSLLVLRLCAWPALLARHEQLLYVSRKLLGQRLFNKLMKMTF

SEQ ID NO: 36901 - protein, 44 aa, Artificial Sequence
  Quasi-synthetic sequence derived from human genome
IRKPGRKYERIFTLLKHVQGSLQTRLIFLQNVIKEASRFKKRML

SEQ ID NO: 36902 - protein, 44 aa, Artificial Sequence
  Quasi-synthetic sequence derived from human genome
TRPLTYRAKRTTKRAGVMIGLAWVISFVLWAPAILFWQYFVGKR

SEQ ID NO: 36903 - protein, 44 aa, Artificial Sequence
  Quasi-synthetic sequence derived from human genome
FVVKMRIKEIKIENGDRKLIGAQKKKKLLKPGPLKRKDTKRLVL

SEQ ID NO: 36904 - protein, 44 aa, Artificial Sequence
  Quasi-synthetic sequence derived from human genome
SFPVPTWILVLSLSLAGALFLLAGLVAVALVVRKVKLRNLQKKR

SEQ ID NO: 36905 - protein, 44 aa, Artificial Sequence
  Quasi-synthetic sequence derived from human genome
SFLRDLVETTHLFLKMLERFCRSRGNLVVQNKQKKRRKKKKKVL

SEQ ID NO: 36906 - protein, 44 aa, Artificial Sequence
  Quasi-synthetic sequence derived from human genome
PMCYALCNKAFRDTFRLLLLCRWDKRRWRKIPKRPGSVHRTPSR

SEQ ID NO: 36907 - protein, 44 aa, Artificial Sequence
  Quasi-synthetic sequence derived from human genome
LRRRFCHMLKNPYTIKKQPLHQFVQRPLFPLPAAFYHPVRYMFI

SEQ ID NO: 36908 - protein, 44 aa, Artificial Sequence
  Quasi-synthetic sequence derived from human genome
LLIIKKKAKHKKHKSGKKSVSKKAITKKRKTVIKSPTVPEFQLI

SEQ ID NO: 36909 - protein, 44 aa, Artificial Sequence
  Quasi-synthetic sequence derived from human genome
LTCLLLWVKQRRDLLHLCCKKLKILGMPFRNIRSILKMVNLDCI

SEQ ID NO: 36910 - protein, 44 aa, Artificial Sequence
  Quasi-synthetic sequence derived from human genome
EKTIFLLFMQSIATISLFLNILEIFHLGFKKIKRGLWGKYKLKK

SEQ ID NO: 36911 - protein, 44 aa, Artificial Sequence
  Quasi-synthetic sequence derived from human genome
LRSICMHTKKRVSSFRGNKIGLKDVITLRRHVETKVRAKIRKRK

SEQ ID NO: 36912 - protein, 44 aa, Artificial Sequence
  Quasi-synthetic sequence derived from human genome
FNLIHRLSLMKTSAIKKIRNPKGPLILRLGAAPVTQPTRRVFPR

SEQ ID NO: 36913 - protein, 44 aa, Artificial Sequence
  Quasi-synthetic sequence derived from human genome
RVLKRKTFNKVLGHVNNILISAVLPTAFRVAKKRAPKVLGTTLV

SEQ ID NO: 36914 - protein, 44 aa, Artificial Sequence
  Quasi-synthetic sequence derived from human genome
GHARSKNWRLSVRCGGWPLRWLMENGFLPDPPRIRYRKKKRILK

SEQ ID NO: 36915 - protein, 44 aa, Artificial Sequence
  Quasi-synthetic sequence derived from human genome
QARLRGFLVRQKFAEHSHFLRTWLPAVIKIQAHWRGYRQRKIYL

SEQ ID NO: 36916 - protein, 44 aa, Artificial Sequence
  Quasi-synthetic sequence derived from human genome
AKLILPNKQKNAAKSNLLQCYAFRALRFLFSMERNRPLFKRLFP

SEQ ID NO: 36917 - protein, 44 aa, Artificial Sequence
  Quasi-synthetic sequence derived from human genome
MRFMLLFSRQGKLRLQKWYLATSDKERKKMVRELMQVVLARKPK

SEQ ID NO: 36918 - protein, 44 aa, Artificial Sequence
  Quasi-synthetic sequence derived from human genome
RTALRVLQLVAGFLLPLLVMAYCYAHILAVLLVSRGQRRLRAMR

SEQ ID NO: 36919 - protein, 44 aa, Artificial Sequence
  Quasi-synthetic sequence derived from human genome
HKVAVKILNRQKIRSLDVVGKIRREIQNLKLFRHPHIIKLYQVI

SEQ ID NO: 36920 - protein, 44 aa, Artificial Sequence
  Quasi-synthetic sequence derived from human genome
RRLPFGKCRIPNNSLPYFHKRPQARMLLLALFCVAVSVVWGVFR

SEQ ID NO: 36921 - protein, 44 aa, Artificial Sequence
  Quasi-synthetic sequence derived from human genome
LTRKGARALAAKALARRRAYRRLNRTVAELVQFLLVKDKKKSPI

SEQ ID NO: 36922 - protein, 44 aa, Artificial Sequence
  Quasi-synthetic sequence derived from human genome
LLLILLCMSLLLFQVIRLYQRRRWTIRAMHLFPAPPAHWFYGHK

SEQ ID NO: 36923 - protein, 44 aa, Artificial Sequence
  Quasi-synthetic sequence derived from human genome
MLLRLYLVPRAVLLRSGVLLNASYRSIGALNQVRFRHWFVAKLY

SEQ ID NO: 36924 - protein, 44 aa, Artificial Sequence
  Quasi-synthetic sequence derived from human genome
MRRPGAPASWIWWRMLRQVLRRGLQSFCHRLGLCVSRHPVFFLT

SEQ ID NO: 36925 - protein, 44 aa, Artificial Sequence
  Quasi-synthetic sequence derived from human genome
FHTRPLLDKPRKASSSLAGAACAPLFALLSRGRRRRMHVLRRRW

SEQ ID NO: 36926 - protein, 44 aa, Artificial Sequence
  Quasi-synthetic sequence derived from human genome
LSLKLRKGTDKKSKSFNDPRLCIRKFFPKRKCFVFDWPAPKKYL

SEQ ID NO: 36927 - protein, 44 aa, Artificial Sequence
  Quasi-synthetic sequence derived from human genome
YWRLTWRVVSPLLLTIFVAYIILLFWKPLRYKAWNPKYELFPSR

SEQ ID NO: 36928 - protein, 44 aa, Artificial Sequence
  Quasi-synthetic sequence derived from human genome
VARPFVSQKLRTKAMARRVLAGIWVLSFLLATPVLAYRTVVPWK

SEQ ID NO: 36929 - protein, 44 aa, Artificial Sequence
  Quasi-synthetic sequence derived from human genome
GQKLLLFYILGTVVAILLLLALALGLLVYRKRRAKREEKKEKKP

SEQ ID NO: 36930 - protein, 44 aa, Artificial Sequence
  Quasi-synthetic sequence derived from human genome
FRCQFANGIFQLWFHFKRYRYRRPGPCWRPIRHCRRDPLWTPTL

SEQ ID NO: 36931 - protein, 44 aa, Artificial Sequence
  Quasi-synthetic sequence derived from human genome
KRVGRRHYCLVEHPQRSKKAVWHKLLSKQRKRAVVACFRMAPLY

SEQ ID NO: 36932 - protein, 44 aa, Artificial Sequence
  Quasi-synthetic sequence derived from human genome
QRRSRWPFSKARSFCKTHASLFKKILLGLLCLAYAAYLLAACIL

SEQ ID NO: 36933 - protein, 44 aa, Artificial Sequence
  Quasi-synthetic sequence derived from human genome
RSPRIRKRFLLRRILEMLFFTQLQVGLIQQWMVPTIQNSMKPFK

SEQ ID NO: 36934 - protein, 44 aa, Artificial Sequence
  Quasi-synthetic sequence derived from human genome
YFITARTLMKMPNIKISRPLKVLLTVVIVFIVTQLPYNIVKFCR

SEQ ID NO: 36935 - protein, 44 aa, Artificial Sequence
  Quasi-synthetic sequence derived from human genome
KKTAWILGVYCRTYSRHMKYVVRRCANRQNLYTKYRPLFGYWVI

SEQ ID NO: 36936 - protein, 44 aa, Artificial Sequence
  Quasi-synthetic sequence derived from human genome
ISKDHGYTIYSTFGAFYIPLLLMLVLYGRIFRAARFRIRKTVKK

SEQ ID NO: 36937 - protein, 44 aa, Artificial Sequence
  Quasi-synthetic sequence derived from human genome
RQQIRKLIKDGLIIRKPVTVHSRARCRKNTLARRKGRHMGIGKR

SEQ ID NO: 36938 - protein, 44 aa, Artificial Sequence
  Quasi-synthetic sequence derived from human genome
RVVLAFMVPLGVITTSYLLLLAFLQRRQRRRQDSRVVARSVRIL

SEQ ID NO: 36939 - protein, 44 aa, Artificial Sequence
  Quasi-synthetic sequence derived from human genome
IFYLLKIANFSNFIFLHLKRRVKSVILVMLLGPLLFLACHLFVI

SEQ ID NO: 36940 - protein, 44 aa, Artificial Sequence
  Quasi-synthetic sequence derived from human genome
RLRALFMKQIYLQEYRAKQSKMLGKKVTDTWAAALRIQKVWRRF

SEQ ID NO: 36941 - protein, 44 aa, Artificial Sequence
  Quasi-synthetic sequence derived from human genome
VVIPLKVISRGRSAKAPGWLSYSLRFGGQKHVVHMRVKKLLVSR

SEQ ID NO: 36942 - protein, 44 aa, Artificial Sequence
  Quasi-synthetic sequence derived from human genome
NFWIILAVAIIVVSVGLGLILYCVCKWQLRRGKKWEIAKPLKHK

SEQ ID NO: 36943 - protein, 44 aa, Artificial Sequence
  Quasi-synthetic sequence derived from human genome
RFISHSSSSSWGMARGSIFKAIAHFKRTTFLKKHRMLGRLKYKV

SEQ ID NO: 36944 - protein, 44 aa, Artificial Sequence
  Quasi-synthetic sequence derived from human genome
KLFIAPLIMVLGLALGAIAVVIGLFVFPIYCLCKKQRKRSRTGM

SEQ ID NO: 36945 - protein, 44 aa, Artificial Sequence
  Quasi-synthetic sequence derived from human genome
KALRAFRVLRPLRLVSGVPSLHIVLNSIMKALVPLLHIALLVLF

SEQ ID NO: 36946 - protein, 44 aa, Artificial Sequence
  Quasi-synthetic sequence derived from human genome
LSIFYLLKIANFSNLLFLHLKRRVRSVILVILLGTLIFLVCHLL

SEQ ID NO: 36947 - protein, 44 aa, Artificial Sequence
  Quasi-synthetic sequence derived from human genome
SFYPSVERKRIQYLHAKLLKKRSKQPLGEVKRRLSLYLTKIHFW

SEQ ID NO: 36948 - protein, 44 aa, Artificial Sequence
  Quasi-synthetic sequence derived from human genome
RRRRRAKITGRERKAMRVLPVVVGAFLLCWTPFFVVHITQALCP

SEQ ID NO: 36949 - protein, 44 aa, Artificial Sequence
  Quasi-synthetic sequence derived from human genome
RRNKRIWASGVVLLETVLFGFLLLYFPVFILYFKPSVFRCIALR

SEQ ID NO: 36950 - protein, 44 aa, Artificial Sequence
  Quasi-synthetic sequence derived from human genome
KSKIKSKYASYLSFIKILLKRGGVKVSTKNLIKLFQIIEQFCPW

SEQ ID NO: 36951 - protein, 44 aa, Artificial Sequence
  Quasi-synthetic sequence derived from human genome
LNPILYTLTTNFFKDKLKQLLHKHQRKSIFKIKKKSLSTSIVWI

SEQ ID NO: 36952 - protein, 44 aa, Artificial Sequence
  Quasi-synthetic sequence derived from human genome
RWARPFYLAFVFCLALGLLQAIKLYLRRQRLLRDLRPFPAPPTH

SEQ ID NO: 36953 - protein, 44 aa, Artificial Sequence
  Quasi-synthetic sequence derived from human genome
ILKRDVAHKVFATTSIKSFFRQLNLYGFRKRRQCTFRTFTRIFS

SEQ ID NO: 36954 - protein, 44 aa, Artificial Sequence
  Quasi-synthetic sequence derived from human genome
LAKRIKTFYALAPVATVKYTKSLINKLRFVPQSLFKFIFGDKIF

SEQ ID NO: 36955 - protein, 44 aa, Artificial Sequence
  Quasi-synthetic sequence derived from human genome
VQLSGRPHLPGKKKIRWDPVRRRFIQSCPIIRIPNRFLRGHRPP

SEQ ID NO: 36956 - protein, 44 aa, Artificial Sequence
  Quasi-synthetic sequence derived from human genome
LTCLLLWVKQRKDLLHLCCKKLKILGMPFRNIRSILKMVNLDCI

SEQ ID NO: 36957 - protein, 44 aa, Artificial Sequence
  Quasi-synthetic sequence derived from human genome
KVKKPKKVYCYVSPKQFSVKEFYLKIIPWRLYTFRVCPGTKFSY

SEQ ID NO: 36958 - protein, 44 aa, Artificial Sequence
  Quasi-synthetic sequence derived from human genome
LPAQRTKRKPSIKAARAKKIFGWGDFYFRVHTLKFSLLVTGKIV

SEQ ID NO: 36959 - protein, 44 aa, Artificial Sequence
  Quasi-synthetic sequence derived from human genome
LIRKPRIVSRGRRPRSQQYSVLFKQLGVNTVRKCYKCNICGKIF

SEQ ID NO: 36960 - protein, 44 aa, Artificial Sequence
  Quasi-synthetic sequence derived from human genome
RSRKDFKRYLLNFIAAMPLISLVNNFLKYGLNELKLCFRVRLTK

SEQ ID NO: 36961 - protein, 44 aa, Artificial Sequence
  Quasi-synthetic sequence derived from human genome
KAFCRMVTRKLETQKCAALRIQFFLQMAVYRRRFVQQKRAAITL

SEQ ID NO: 36962 - protein, 44 aa, Artificial Sequence
  Quasi-synthetic sequence derived from human genome
KLVKPKKKRRKKSVYTVGLRGLINLGNTCFMNCIVQALTHIPLL

SEQ ID NO: 36963 - protein, 44 aa, Artificial Sequence
  Quasi-synthetic sequence derived from human genome
MLRTLLRRRLFSYPTKYYFMVLVLSLITFSVLRIHQKPEFVSVR

SEQ ID NO: 36964 - protein, 44 aa, Artificial Sequence
  Quasi-synthetic sequence derived from human genome
RLHKTGLRGRKGNLAICVIILLFILAVINLIITLVIWAVIRIGP

SEQ ID NO: 36965 - protein, 44 aa, Artificial Sequence
  Quasi-synthetic sequence derived from human genome
RIIGAVLKIKTASGRKKAFSTCASHLAVVLIFFGSIIFMYVRLK

SEQ ID NO: 36966 - protein, 44 aa, Artificial Sequence
  Quasi-synthetic sequence derived from human genome
LKKQMKKVKKMTVKDMVTAFFSSYWSIFMTLLHFVASVFRGFFR

SEQ ID NO: 36967 - protein, 44 aa, Artificial Sequence
  Quasi-synthetic sequence derived from human genome
WRKIKNMVHWSPFVMSFKKKYPWIQLAGHAGSFKAAANGRILKK

SEQ ID NO: 36968 - protein, 44 aa, Artificial Sequence
  Quasi-synthetic sequence derived from human genome
KVVQVFRLMRIFRVLKLARHSTGLRSLGATLKHSYREVGILLLY

SEQ ID NO: 36969 - protein, 44 aa, Artificial Sequence
  Quasi-synthetic sequence derived from human genome
RSRRRTRFVFQKALRSLRRYPLPLRSGKEAKILQHFGDGLCRML

SEQ ID NO: 36970 - protein, 44 aa, Artificial Sequence
  Quasi-synthetic sequence derived from human genome
HKLTIILTKWRNTARHKSKKKEDELILKHELQLKKWKNRLILKR

SEQ ID NO: 36971 - protein, 44 aa, Artificial Sequence
  Quasi-synthetic sequence derived from human genome
GHFRKERIEGLRKRRRLLSIIVVLVVTFALCWMPYHLVKTLYML

SEQ ID NO: 36972 - protein, 44 aa, Artificial Sequence
  Quasi-synthetic sequence derived from human genome
LVLLALCLLLPLLLLGGWKRWRRGRAARHVVAVVLGDVGRSPRM

SEQ ID NO: 36973 - protein, 44 aa, Artificial Sequence
  Quasi-synthetic sequence derived from human genome
RRAKRKVTRMILIVAALFCLCWMPHHALILCVWFGQFPLTRATY

SEQ ID NO: 36974 - protein, 44 aa, Artificial Sequence
  Quasi-synthetic sequence derived from human genome
YVLVFDAFVIVICLASLILCTRSIVLALRLRKRFLNFFLEKYKR

SEQ ID NO: 36975 - protein, 44 aa, Artificial Sequence
  Quasi-synthetic sequence derived from human genome
KQRKLKINPKRYKGNFLQSCVQLRASRLRTPTWVRRRSRHPPAL

SEQ ID NO: 36976 - protein, 44 aa, Artificial Sequence
  Quasi-synthetic sequence derived from human genome
FHFNRYLTRRRRIEIANNLCLNERQIKIWFQNRRMKWKKDSKMK

SEQ ID NO: 36977 - protein, 44 aa, Artificial Sequence
  Quasi-synthetic sequence derived from human genome
WRSFLGRKQYQLTVQVAYYTMMMNLYNAMAVRIQRRWRGYRVRK

SEQ ID NO: 36978 - protein, 44 aa, Artificial Sequence
  Quasi-synthetic sequence derived from human genome
RGRQVTVPRAWLLFLRGSLPTFRSSLFLWVRPNGRVGPLVAGRR

SEQ ID NO: 36979 - protein, 44 aa, Artificial Sequence
  Quasi-synthetic sequence derived from human genome
KFLRNKAIIRHRPALVKVILISSVAFSIALICGMAISYMIYRLA

SEQ ID NO: 36980 - protein, 44 aa, Artificial Sequence
  Quasi-synthetic sequence derived from human genome
FLRRRLARSMNVTELAVQIWFENRRAKWRRHQRALMARNMLPFM

SEQ ID NO: 36981 - protein, 44 aa, Artificial Sequence
  Quasi-synthetic sequence derived from human genome
RLMHIFTISKTLGPKIIIVKRMMKDVFFFLFLLAVWVVSFGVAK

SEQ ID NO: 36982 - protein, 44 aa, Artificial Sequence
  Quasi-synthetic sequence derived from human genome
VLAHPRYLQHHIKYQHLLKKKYVCPHPSCGRLFRLQKQLLRHAK

SEQ ID NO: 36983 - protein, 44 aa, Artificial Sequence
  Quasi-synthetic sequence derived from human genome
KIAARMLWRILNGHSLTRRERRQFLRICADLFRLVPFLVFVVVP

SEQ ID NO: 36984 - protein, 44 aa, Artificial Sequence
  Quasi-synthetic sequence derived from human genome
LKKGKLCFCCRTRRFSFFTWSYTCQFCKRPVCSQCCKKMRLPSK

SEQ ID NO: 36985 - protein, 44 aa, Artificial Sequence
  Quasi-synthetic sequence derived from human genome
IIIKGSVGGLLVLIVILVILFKCGFFKRKYQQLNLESIRKAQLK

SEQ ID NO: 36986 - protein, 44 aa, Artificial Sequence
  Quasi-synthetic sequence derived from human genome
KLAQKGKSLSPLASITGISLFLIISMCLLFLWKKYQPYKVIKQK

SEQ ID NO: 36987 - protein, 44 aa, Artificial Sequence
  Quasi-synthetic sequence derived from human genome
LRKLNDLVKRARLVRVHAYIISYLKKEMPSVFGKENKKKQLILK

SEQ ID NO: 36988 - protein, 44 aa, Artificial Sequence
  Quasi-synthetic sequence derived from human genome
LRGKFKRPPLRRVRVSADAMLRALLGSKHKVSMDLRANLKSVKK

SEQ ID NO: 36989 - protein, 44 aa, Artificial Sequence
  Quasi-synthetic sequence derived from human genome
RWKYIQQVYLASFWLAMSSTMYNPIIYCCLNKRFRAGFKRAFRW

SEQ ID NO: 36990 - protein, 44 aa, Artificial Sequence
  Quasi-synthetic sequence derived from human genome
KFPGNPWPPYKKRTSLHPSYKGLMRLLHCKTLHIVLFTLLYKIL

SEQ ID NO: 36991 - protein, 44 aa, Artificial Sequence
  Quasi-synthetic sequence derived from human genome
MRKVGRMKGMPTKLSAVGILVGTLVAIGIFLILIFTHWTMSRKK

SEQ ID NO: 36992 - protein, 44 aa, Artificial Sequence
  Quasi-synthetic sequence derived from human genome
KALRAFRVLRPLRLVSGVPSLQVVLNSIFKAMLPLFHIALLVLF

SEQ ID NO: 36993 - protein, 44 aa, Artificial Sequence
  Quasi-synthetic sequence derived from human genome
FVIQRKKWVDLAWMITFYVRFFLTYVPLLGLKAFLGLFFIVRFL

SEQ ID NO: 36994 - protein, 44 aa, Artificial Sequence
  Quasi-synthetic sequence derived from human genome
RNLYYFSYPLFVGFALLRLVAFHLGLLFVWLCQRFSRALMAAKR

SEQ ID NO: 36995 - protein, 44 aa, Artificial Sequence
  Quasi-synthetic sequence derived from human genome
LLGKPLLGKDLVRVEATVIEKTESWPRIIMRFRKRKNFKKKRIV

SEQ ID NO: 36996 - protein, 44 aa, Artificial Sequence
  Quasi-synthetic sequence derived from human genome
LLLFQYCLPLGFILVCYARIYRRLQRQGRVFHKGTYSLRAGHMK

SEQ ID NO: 36997 - protein, 44 aa, Artificial Sequence
  Quasi-synthetic sequence derived from human genome
KIFPCDKYVKVFHKFLNANRHKTRHTGKKPFKCKKCGKSFCMLL

SEQ ID NO: 36998 - protein, 44 aa, Artificial Sequence
  Quasi-synthetic sequence derived from human genome
KVRFFSGTCFIVLFNIWRKVKFASCILNNIFYFHLKQQFLNGRV

SEQ ID NO: 36999 - protein, 44 aa, Artificial Sequence
  Quasi-synthetic sequence derived from human genome
MRKLFIQRAKKIDKISRIGFPMAFLIFNMFYWIIYKIVRREDVH

SEQ ID NO: 37000 - protein, 44 aa, Artificial Sequence
  Quasi-synthetic sequence derived from human genome
LARFVLLAQSRPGWLGVAALGLTAVALGAVAWRRAWPTRRRRLL

SEQ ID NO: 37001 - protein, 45 aa, Artificial Sequence
  Quasi-synthetic sequence derived from human genome
LLAKGLLIFLLLVILAMGLWVIRVQKRHKMPRMKKLMRNRMKLRK

SEQ ID NO: 37002 - protein, 45 aa, Artificial Sequence
  Quasi-synthetic sequence derived from human genome
RARLIPIIVLLLQKAWRGTLARWRCRRLRAIYTIMRWFRRHKVRA

SEQ ID NO: 37003 - protein, 45 aa, Artificial Sequence
  Quasi-synthetic sequence derived from human genome
KKKKKRYLRASSNRNFLLTMRPFLKRAILVLSYVLVILYFRLWIM

SEQ ID NO: 37004 - protein, 45 aa, Artificial Sequence
  Quasi-synthetic sequence derived from human genome
PVKIKVRFSFFLQIYLIMIFLGLYINFRHLYKQRRRRYGQKKKKI

SEQ ID NO: 37005 - protein, 45 aa, Artificial Sequence
  Quasi-synthetic sequence derived from human genome
LLLKRGSCRSTWLRVRKARPQLILSRRPRRRLGSLRWCGRRRLRW

SEQ ID NO: 37006 - protein, 45 aa, Artificial Sequence
  Quasi-synthetic sequence derived from human genome
FHFLYGKNRSRIPLLRKRWFQLGRSMNPRARKKRSRIPLLRKRRF

SEQ ID NO: 37007 - protein, 45 aa, Artificial Sequence
  Quasi-synthetic sequence derived from human genome
FFDIKLLRNIPRWTHLLRLLRLIILLRIFHLFHQKRQLEKLIRRR

SEQ ID NO: 37008 - protein, 45 aa, Artificial Sequence
  Quasi-synthetic sequence derived from human genome
LRAQMLIRIVLFLQKVWRGTLARMRYKRTKAALTIIRYYRRYKVK

SEQ ID NO: 37009 - protein, 45 aa, Artificial Sequence
  Quasi-synthetic sequence derived from human genome
FLARKQYRKVLYCVVIIQKNYRAFLLRRRFLHLKKAAIVFQKQLR

SEQ ID NO: 37010 - protein, 45 aa, Artificial Sequence
  Quasi-synthetic sequence derived from human genome
VIYIQAIFRGKKARRHLKMMHIAATLIQRRFRTLMMRRRFLSLKK

SEQ ID NO: 37011 - protein, 45 aa, Artificial Sequence
  Quasi-synthetic sequence derived from human genome
PRPHRIAGVKRFLKHAGKWSLRWFLSPRWILQFRRWARKWSRFTR

SEQ ID NO: 37012 - protein, 45 aa, Artificial Sequence
  Quasi-synthetic sequence derived from human genome
IRIFKRKKRIKRRALLFLSYILTHFIFLALLLILIVLLRHTDCFY

SEQ ID NO: 37013 - protein, 45 aa, Artificial Sequence
  Quasi-synthetic sequence derived from human genome
YRLRRVIAAFYFPKREKKRILFLYNDLLKKRAAFTKLRRAAILRR

SEQ ID NO: 37014 - protein, 45 aa, Artificial Sequence
  Quasi-synthetic sequence derived from human genome
KTAFRIYAVSTLLLFLLFFLFRLLLRFLRLCRSFYITCRRLRCFP

SEQ ID NO: 37015 - protein, 45 aa, Artificial Sequence
  Quasi-synthetic sequence derived from human genome
RLLKRLLGPKLRRFLKPQGHPRLLLWFKRGLALAAFLGLVLWLSL

SEQ ID NO: 37016 - protein, 45 aa, Artificial Sequence
  Quasi-synthetic sequence derived from human genome
FHFLYRKNRSRIPLLRKRWFQLGHSMNPRARKNRSRIPLLRKRRF

SEQ ID NO: 37017 - protein, 45 aa, Artificial Sequence
  Quasi-synthetic sequence derived from human genome
ARIIQLAVINFLAKQRLRKRVNAALVIQKYWRRVLAQRKLLMLKK

SEQ ID NO: 37018 - protein, 45 aa, Artificial Sequence
  Quasi-synthetic sequence derived from human genome
KRALGRRKGVWLRLRKILFCVLGLYIAIPFLIKLCPGIQAKLIFL

SEQ ID NO: 37019 - protein, 45 aa, Artificial Sequence
  Quasi-synthetic sequence derived from human genome
RCLRGFFIKRRFRSLRHKIILLQSRARGYLARQRYQQMRRSLVKF

SEQ ID NO: 37020 - protein, 45 aa, Artificial Sequence
  Quasi-synthetic sequence derived from human genome
RNIPRWTHLLRLLRLIILLRIFHLFHQKRQLEKLIRRRVSENKRR

SEQ ID NO: 37021 - protein, 45 aa, Artificial Sequence
  Quasi-synthetic sequence derived from human genome
RCRGKLLVHSLNLLAKQGLRLLRGLRRRNVQKKVALAKKLLAKLR

SEQ ID NO: 37022 - protein, 45 aa, Artificial Sequence
  Quasi-synthetic sequence derived from human genome
LALFVLTCVVLTFLGHRLLKRLLGPKLRRFLKPQGHPRLLLWFKR

SEQ ID NO: 37023 - protein, 45 aa, Artificial Sequence
  Quasi-synthetic sequence derived from human genome
RKVLYCVVIIQKNYRAFLLRRRFLHLKKAAIVFQKQLRGQIARRV

SEQ ID NO: 37024 - protein, 45 aa, Artificial Sequence
  Quasi-synthetic sequence derived from human genome
WWRGVLVRRTLLVAALRAWMIQCWWRTLVQRRIRQRRQALLRVYV

SEQ ID NO: 37025 - protein, 45 aa, Artificial Sequence
  Quasi-synthetic sequence derived from human genome
RFRSLLVRRRFISLKKATIFVQRKYRATICAKHKLYQFLHLRKAA

SEQ ID NO: 37026 - protein, 45 aa, Artificial Sequence
  Quasi-synthetic sequence derived from human genome
RRWGQAISKSKLSRRWRRWNRFNRRRCRAAVKSVTFYWLVIVLVF

SEQ ID NO: 37027 - protein, 45 aa, Artificial Sequence
  Quasi-synthetic sequence derived from human genome
RCLNKIMKTRVCRRLRRANRVLRARCRRAVKSNACYWAVLLLVFL

SEQ ID NO: 37028 - protein, 45 aa, Artificial Sequence
  Quasi-synthetic sequence derived from human genome
FHFLYRKNRSRIPLLRKPWFQLGHSMNPRARKNRSRIPLLRKRRF

SEQ ID NO: 37029 - protein, 45 aa, Artificial Sequence
  Quasi-synthetic sequence derived from human genome
WMRRMRILRRLLRRYRESKKIDRHMYHSLYLKVKGNVFKNKRILM

SEQ ID NO: 37030 - protein, 45 aa, Artificial Sequence
  Quasi-synthetic sequence derived from human genome
PRARKKRSRIPLLRKRRFQLGRSMNPRARKNRSRIPLLRKRRFQL

SEQ ID NO: 37031 - protein, 45 aa, Artificial Sequence
  Quasi-synthetic sequence derived from human genome
RLYLQKKIIQKHFEKKKDIRRGIGYLKLICFLIPFLLSLKKKMKV

SEQ ID NO: 37032 - protein, 45 aa, Artificial Sequence
  Quasi-synthetic sequence derived from human genome
KFLRRTKAATIIQKYWRMYVVRRRYKIRRAATIVLQSYLRGFLAR

SEQ ID NO: 37033 - protein, 45 aa, Artificial Sequence
  Quasi-synthetic sequence derived from human genome
RSLLLGPARLCLRLLLLLGYRRRCPPLLRGLVQRWRYGKVCLRSL

SEQ ID NO: 37034 - protein, 45 aa, Artificial Sequence
  Quasi-synthetic sequence derived from human genome
RARKNRSRIPLLRKRRFQLGRSMNLRARKNRSQIVLFQKRRFQFF

SEQ ID NO: 37035 - protein, 45 aa, Artificial Sequence
  Quasi-synthetic sequence derived from human genome
NRTGRRKSWRLEFLFLRRRCFLLTFYLWFLFFSRFLLMLFLPLLT

SEQ ID NO: 37036 - protein, 45 aa, Artificial Sequence
  Quasi-synthetic sequence derived from human genome
RKRIQYLHAKLLKKRSKQPLGEVKRRLSLYLTKIHFWLPVLKMIR

SEQ ID NO: 37037 - protein, 45 aa, Artificial Sequence
  Quasi-synthetic sequence derived from human genome
KFLRVKRSAICIQSWWRGTLGRRKAAKRKWAAQTIRRLIRGFVLR

SEQ ID NO: 37038 - protein, 45 aa, Artificial Sequence
  Quasi-synthetic sequence derived from human genome
FHFLYGKNRSRIPLLRKRRFQLYRSMNPRARKNRSHIPLVRKRRF

SEQ ID NO: 37039 - protein, 45 aa, Artificial Sequence
  Quasi-synthetic sequence derived from human genome
IQRALRAPRKKIHRRVLKKNPLKNLRIMLKLNPYAKTMRRNTILR

SEQ ID NO: 37040 - protein, 45 aa, Artificial Sequence
  Quasi-synthetic sequence derived from human genome
HRISKSKFSRYWRRWNRFCRRKCRAAVKSNVFYWLVIFLVFLNTL

SEQ ID NO: 37041 - protein, 45 aa, Artificial Sequence
  Quasi-synthetic sequence derived from human genome
PPPKRKKKKKFCYLCILLLIVLFILLCCLYRLCKKSKPIKKQQDV

SEQ ID NO: 37042 - protein, 45 aa, Artificial Sequence
  Quasi-synthetic sequence derived from human genome
RLKNIRKVYGRCMWYRLRLLKPQPNIIPTVKKIVLLAGWALFLFL

SEQ ID NO: 37043 - protein, 45 aa, Artificial Sequence
  Quasi-synthetic sequence derived from human genome
KFFLLKRFNKEKLGLLLLTFLGIVAAVLVKKYQAVLRRKALLIFL

SEQ ID NO: 37044 - protein, 45 aa, Artificial Sequence
  Quasi-synthetic sequence derived from human genome
RARKNRSRIPLLRKRRFQLYRSMNSRARKNRSQIVLFQKRRFHFF

SEQ ID NO: 37045 - protein, 45 aa, Artificial Sequence
  Quasi-synthetic sequence derived from human genome
KLLPLRTFRVFRALKAISVVSRLKVIVGALLRSVKKLVNVIILTF

SEQ ID NO: 37046 - protein, 45 aa, Artificial Sequence
  Quasi-synthetic sequence derived from human genome
CIRIQKTIRGWLLRKKYLRMRKAAITMQRYVRGYQARCYAKFLRR

SEQ ID NO: 37047 - protein, 45 aa, Artificial Sequence
  Quasi-synthetic sequence derived from human genome
RARKNRSRIPLLRKRRFQLYRSTNPRARKNRSRIPLLRKRRFQLY

SEQ ID NO: 37048 - protein, 45 aa, Artificial Sequence
  Quasi-synthetic sequence derived from human genome
ISKSKLSRRWRRWNRFNRRRCRAAVKSVTFYWLVIVLVFLNTLTI

SEQ ID NO: 37049 - protein, 45 aa, Artificial Sequence
  Quasi-synthetic sequence derived from human genome
KIFRCPSPIYFANIGFFRRKLIDAVGFSPLRILRKRNKALRKIRK

SEQ ID NO: 37050 - protein, 45 aa, Artificial Sequence
  Quasi-synthetic sequence derived from human genome
RARKNRSHIPLVRKRRFQLRRCMNPRARKNRSQIVLFQKRRFHFF

SEQ ID NO: 37051 - protein, 45 aa, Artificial Sequence
  Quasi-synthetic sequence derived from human genome
WIIRTPILMTILINFLIFIRILGILLSKLRTRQMRCRDYRLRLAR

SEQ ID NO: 37052 - protein, 45 aa, Artificial Sequence
  Quasi-synthetic sequence derived from human genome
LLRLLNKLTKWKHSRTMMLVVFKSAPILKRALKVKQAMLQLYVLK

SEQ ID NO: 37053 - protein, 45 aa, Artificial Sequence
  Quasi-synthetic sequence derived from human genome
FIVTLLVYIKIYIVLRRRRKRVNTKRSSRAFRAHLRAPLKEAARR

SEQ ID NO: 37054 - protein, 45 aa, Artificial Sequence
  Quasi-synthetic sequence derived from human genome
KKPLIFLGCCFFSTLVLLLSIAIFQRQKRRKFWKAKNLQHIPLKK

SEQ ID NO: 37055 - protein, 45 aa, Artificial Sequence
  Quasi-synthetic sequence derived from human genome
RRRKMNHHKYRKLVKKTRFLRRKVQEGRLRRKQIKFEKDLRRIWL

SEQ ID NO: 37056 - protein, 45 aa, Artificial Sequence
  Quasi-synthetic sequence derived from human genome
FLYGKTRSRIPLLRKRRFQLCRCMNPRARKNRSQIVLFQKLRFQF

SEQ ID NO: 37057 - protein, 45 aa, Artificial Sequence
  Quasi-synthetic sequence derived from human genome
FLRLHCGLWVRRKAGYKKKLWKKTPARKKRLREFVFCNKTQSKLL

SEQ ID NO: 37058 - protein, 45 aa, Artificial Sequence
  Quasi-synthetic sequence derived from human genome
RLGLLGRRGFSGRLGGYWKTWIFWKTWIFWKTWIFRKTYIGWKTW

SEQ ID NO: 37059 - protein, 45 aa, Artificial Sequence
  Quasi-synthetic sequence derived from human genome
RTLDRRLRKNLRALVVVHATWYVKAFLALLRPFISSKFTRKIRFL

SEQ ID NO: 37060 - protein, 45 aa, Artificial Sequence
  Quasi-synthetic sequence derived from human genome
FRVIRLARIGRILRLIRAAKGIRTLLFALMMSLPALFNIGLLLFL

SEQ ID NO: 37061 - protein, 45 aa, Artificial Sequence
  Quasi-synthetic sequence derived from human genome
FLRLQALHRSRKLHQQYRLARQRIIQFQARCRAYLVRKAFRHRLW

SEQ ID NO: 37062 - protein, 45 aa, Artificial Sequence
  Quasi-synthetic sequence derived from human genome
VLRRIILLQRWFRVLLCRQHFLHLRQASVIIQRFWRNYLNQKQVR

SEQ ID NO: 37063 - protein, 45 aa, Artificial Sequence
  Quasi-synthetic sequence derived from human genome
AGLKVLFKKTHRILRRLFNLCKRCHRQPRFRLPKERSLSYWWNRI

SEQ ID NO: 37064 - protein, 45 aa, Artificial Sequence
  Quasi-synthetic sequence derived from human genome
YVPFIVTLLVYIKIYIVLRRRRKRVNTKRSSRAFRAHLRAPLKGN

SEQ ID NO: 37065 - protein, 45 aa, Artificial Sequence
  Quasi-synthetic sequence derived from human genome
LRILNKLTKWKHSRTMMLVVFKSAPILKRALKVKQAMMQLYVLKL

SEQ ID NO: 37066 - protein, 45 aa, Artificial Sequence
  Quasi-synthetic sequence derived from human genome
QRRPWGAWLSARLWKWLKSPRSWRLGLALLLGGALLFWVLLHRRW

SEQ ID NO: 37067 - protein, 45 aa, Artificial Sequence
  Quasi-synthetic sequence derived from human genome
LLRICRVLRSLKLLAQFRQIQIIILVLVRALKSMTFLLMLLLIFF

SEQ ID NO: 37068 - protein, 45 aa, Artificial Sequence
  Quasi-synthetic sequence derived from human genome
FRVIRLARIGRILRLIRGAKGIRTLLFALMMSLPALFNIGLLLFL

SEQ ID NO: 37069 - protein, 45 aa, Artificial Sequence
  Quasi-synthetic sequence derived from human genome
KTMKFIVWRRFKWVIIGLLFLLILLLFVAVLLYSLPNYLSMKIVK

SEQ ID NO: 37070 - protein, 45 aa, Artificial Sequence
  Quasi-synthetic sequence derived from human genome
GRLRELRIRCVARKFLYLWIRMTFGRVFPSKARFYYEQRLLRKVF

SEQ ID NO: 37071 - protein, 45 aa, Artificial Sequence
  Quasi-synthetic sequence derived from human genome
RARKNRSRIPLLRKRRFQLYRSTNPRARKNRSRIPLLRKHRFQLY

SEQ ID NO: 37072 - protein, 45 aa, Artificial Sequence
  Quasi-synthetic sequence derived from human genome
RARKNRSRIPLLRKHRFQLYRSMNSRARKNRSQIVLFQKRRFHFF

SEQ ID NO: 37073 - protein, 45 aa, Artificial Sequence
  Quasi-synthetic sequence derived from human genome
LFRVIRLARIGRILRLIKGAKGIRTLLFALMMSLPALFNIGLLLF

SEQ ID NO: 37074 - protein, 45 aa, Artificial Sequence
  Quasi-synthetic sequence derived from human genome
RFLKLKYYSIILQSRIRMIIAVTSYKRYLWATVTIQRHWRAYLRR

SEQ ID NO: 37075 - protein, 45 aa, Artificial Sequence
  Quasi-synthetic sequence derived from human genome
RLMLKYQKILWKVPSFLITQVRRMNEATMLLKKQLPSVRKLLRRK

SEQ ID NO: 37076 - protein, 45 aa, Artificial Sequence
  Quasi-synthetic sequence derived from human genome
PRLPVKKIRKQMKLLLLLLLLSCAAWLTYVHLGLVRQGRALRQRL

SEQ ID NO: 37077 - protein, 45 aa, Artificial Sequence
  Quasi-synthetic sequence derived from human genome
QMNVRMPFRRKIYYLPRRYKFMSRIDKQISRFRRWLPKKPMRLDK

SEQ ID NO: 37078 - protein, 45 aa, Artificial Sequence
  Quasi-synthetic sequence derived from human genome
TLIQRRFRTLMMRRRFLSLKKTAILIQRKYRAHLCTKHHLQFLQV

SEQ ID NO: 37079 - protein, 45 aa, Artificial Sequence
  Quasi-synthetic sequence derived from human genome
LVASFLFVLMLLFFTILVLSYFRYMRIYRRYIYEPLHKPQRKRKK

SEQ ID NO: 37080 - protein, 45 aa, Artificial Sequence
  Quasi-synthetic sequence derived from human genome
FFLIAVRLASLNQILDPWVYLLLRKILLRKFCQMRKRRLREQFWR

SEQ ID NO: 37081 - protein, 45 aa, Artificial Sequence
  Quasi-synthetic sequence derived from human genome
LALVGVLILFMFRRLRQFRQAQPTPQYRFRKRDKVMFYGRKIMRK

SEQ ID NO: 37082 - protein, 45 aa, Artificial Sequence
  Quasi-synthetic sequence derived from human genome
WKTWIFWKTWIFRKTYIGWKTWIFSGRCGLTGRPGFGGRRRFFWK

SEQ ID NO: 37083 - protein, 45 aa, Artificial Sequence
  Quasi-synthetic sequence derived from human genome
AAMRRIRYEFKAKNIKKKKVSIMVSVDGVKVILKKKKKLLLLQKK

SEQ ID NO: 37084 - protein, 45 aa, Artificial Sequence
  Quasi-synthetic sequence derived from human genome
VHPLRLRHLRRPRVARLLCLGVWALILVFAVPAARVHRPSRCRYR

SEQ ID NO: 37085 - protein, 45 aa, Artificial Sequence
  Quasi-synthetic sequence derived from human genome
LLFLSVPQPRPPGARTRAGAARVARWRRLRLQQLRRLRGLLRVLR

SEQ ID NO: 37086 - protein, 45 aa, Artificial Sequence
  Quasi-synthetic sequence derived from human genome
RVIRLARIGRILRLIRGAKGIRTLLFALMMSLPALFNIGLLLFLV

SEQ ID NO: 37087 - protein, 45 aa, Artificial Sequence
  Quasi-synthetic sequence derived from human genome
VPVFWPILVMYFIMLFCITMKRQIKHMIKYRYIPFTHGKRRYRGK

SEQ ID NO: 37088 - protein, 45 aa, Artificial Sequence
  Quasi-synthetic sequence derived from human genome
GVLLRRVTRNLVRNKLAVITRLLQNLIMGLFLLFFVLRVRSNVLK

SEQ ID NO: 37089 - protein, 45 aa, Artificial Sequence
  Quasi-synthetic sequence derived from human genome
KIFFRAGQVAYLEKLRADKLRAACIRIQKTIRGWLLRKKYLRMRK

SEQ ID NO: 37090 - protein, 45 aa, Artificial Sequence
  Quasi-synthetic sequence derived from human genome
KSLRVLRVLRPLKTIKRLPKLKAVFDCVVTSLKNVFNILIVYKLF

SEQ ID NO: 37091 - protein, 45 aa, Artificial Sequence
  Quasi-synthetic sequence derived from human genome
LRKRIHRPRRRTTRRWKRWFKFRKRKGEKRPRPNHKAVARRAKLK

SEQ ID NO: 37092 - protein, 45 aa, Artificial Sequence
  Quasi-synthetic sequence derived from human genome
AFVRGYLVRKQMRLQRKAVISLQSYFRMRKARQYYLKMYKAIIVI

SEQ ID NO: 37093 - protein, 45 aa, Artificial Sequence
  Quasi-synthetic sequence derived from human genome
FIQAWWRGMLVRRTLLHAALRAWIIQCWWRQVLEKLLAKRRRMVL

SEQ ID NO: 37094 - protein, 45 aa, Artificial Sequence
  Quasi-synthetic sequence derived from human genome
RYKIRRAATIVLQSYLRGFLARNRYRKILREHKAVIIQKRVRGWL

SEQ ID NO: 37095 - protein, 45 aa, Artificial Sequence
  Quasi-synthetic sequence derived from human genome
LLLLLLTFVLPLVVTLFCYCRISRRLRRPPHVGRARRNSLRIIFA

SEQ ID NO: 37096 - protein, 45 aa, Artificial Sequence
  Quasi-synthetic sequence derived from human genome
KFKLFTLVSACIPVFRLARRRKKILFYCHFPDLLLTKRDSFLKRL

SEQ ID NO: 37097 - protein, 45 aa, Artificial Sequence
  Quasi-synthetic sequence derived from human genome
YPRGVGWRILKVLLWLLAILTGLIAGKFLFHQRLFGQLLRLKMFR

SEQ ID NO: 37098 - protein, 45 aa, Artificial Sequence
  Quasi-synthetic sequence derived from human genome
RKRRKMSKKLPPVIIKYIIINRFRGRKNMLVKLGKIDSKEKQVIL

SEQ ID NO: 37099 - protein, 45 aa, Artificial Sequence
  Quasi-synthetic sequence derived from human genome
RWKKVQWCSLSVIKLKNKIKYRAEACIKMQKTIRMWLCKRRHKPR

SEQ ID NO: 37100 - protein, 45 aa, Artificial Sequence
  Quasi-synthetic sequence derived from human genome
RLLMSLFLFFFVLFLCLFFYNCYKGYLPRQCLKFRSALLIGKKKP

SEQ ID NO: 37101 - protein, 45 aa, Artificial Sequence
  Quasi-synthetic sequence derived from human genome
PRSKILTVRVILAPWKKGLIAVVIIGVIIALLIIAAKCYFLRKAK

SEQ ID NO: 37102 - protein, 45 aa, Artificial Sequence
  Quasi-synthetic sequence derived from human genome
KIQATWKCYKARKFFLFYRQQKWASGVIAIAWLLYCHKTRLKKIL

SEQ ID NO: 37103 - protein, 45 aa, Artificial Sequence
  Quasi-synthetic sequence derived from human genome
FKVIFWLGYFNSCVNPLIYPCSSREFKRAFLRLLRCQCRRRRRRR

SEQ ID NO: 37104 - protein, 45 aa, Artificial Sequence
  Quasi-synthetic sequence derived from human genome
KFLSLANKRLPVKRAAVQFLNNAWGIQKKQNAKRFKRRWMVRKMK

SEQ ID NO: 37105 - protein, 45 aa, Artificial Sequence
  Quasi-synthetic sequence derived from human genome
IPKAKQRLKRLRNIHYLFNTALFLIAWRLLIARSQMARNVWFFIV

SEQ ID NO: 37106 - protein, 45 aa, Artificial Sequence
  Quasi-synthetic sequence derived from human genome
LKKKRRNFAELKIKRLRKKFAQKMLRKARRKLIYEKAKHYHKEYR

SEQ ID NO: 37107 - protein, 45 aa, Artificial Sequence
  Quasi-synthetic sequence derived from human genome
MRRLRRLAHLVLFCPFSKRLQGRLPGLRVRCIFLAWLGVFAGSWL

SEQ ID NO: 37108 - protein, 45 aa, Artificial Sequence
  Quasi-synthetic sequence derived from human genome
RKQIKRKAPRGFLKRVFKRKKPQLRLEKSGDLLVHLNCLLFVHRL

SEQ ID NO: 37109 - protein, 45 aa, Artificial Sequence
  Quasi-synthetic sequence derived from human genome
MKVFHKYSNRNKVRHTKKKTFKCIKCSKSFFMLSCLIRHKRIHIR

SEQ ID NO: 37110 - protein, 45 aa, Artificial Sequence
  Quasi-synthetic sequence derived from human genome
RRQKLLLAQLHHRKRVKAAGQIQAWWRGVLVRRTLLVAALRAWMI

SEQ ID NO: 37111 - protein, 45 aa, Artificial Sequence
  Quasi-synthetic sequence derived from human genome
KIQAWWRGTLVRRALLHAALSACIIQCWWRLILSKILKKRRQAAL

SEQ ID NO: 37112 - protein, 45 aa, Artificial Sequence
  Quasi-synthetic sequence derived from human genome
KRCNRRLKSQILLKKYLMKRRWKKNFIAVSAANRFKKISSSGALM

SEQ ID NO: 37113 - protein, 45 aa, Artificial Sequence
  Quasi-synthetic sequence derived from human genome
IIRKYISKYSVFLRHRYQSRSAFLGRYLKKKKSVVSRLKKAKRTA

SEQ ID NO: 37114 - protein, 45 aa, Artificial Sequence
  Quasi-synthetic sequence derived from human genome
RMPLSRWQRRLRRAARRQVLSGHLPFCRFRLRYPSLSPSAFWVWK

SEQ ID NO: 37115 - protein, 45 aa, Artificial Sequence
  Quasi-synthetic sequence derived from human genome
RGRKRCIKKFSIQRFPKILVLHLKRFSESRIRTSKLTTFVNFPLR

SEQ ID NO: 37116 - protein, 45 aa, Artificial Sequence
  Quasi-synthetic sequence derived from human genome
ILAKISRPKKRAKTITFSKNAVISKRGGKLCLLIRVANLRKSLLI

SEQ ID NO: 37117 - protein, 45 aa, Artificial Sequence
  Quasi-synthetic sequence derived from human genome
AIFNFILVVMFWLIFLLIILSYIKIGKNLLRISKRRSKFPNSGKY

SEQ ID NO: 37118 - protein, 45 aa, Artificial Sequence
  Quasi-synthetic sequence derived from human genome
FTLFKCLLLTGGCTLLHCFVILPVFLTFFPPSKKHHKKKKRAKRK

SEQ ID NO: 37119 - protein, 45 aa, Artificial Sequence
  Quasi-synthetic sequence derived from human genome
LRALRFLSVISIVDPWIFIIFRSPVFRIFFHKIFIRPLRYRSRCS

SEQ ID NO: 37120 - protein, 45 aa, Artificial Sequence
  Quasi-synthetic sequence derived from human genome
RWKVVLLVRTDKRSDSLIRKKFRMMKIPKPILFGLNIAMKKQTKI

SEQ ID NO: 37121 - protein, 45 aa, Artificial Sequence
  Quasi-synthetic sequence derived from human genome
RRPRIHFRFPNRPFVPSRCNHRFPFQPFYWPHRYLTYRYFPRRRL

SEQ ID NO: 37122 - protein, 45 aa, Artificial Sequence
  Quasi-synthetic sequence derived from human genome
RRMIDYRHFVPQMPFVPAVAKSIPRKRISLKRPKKCFRNLFHIRR

SEQ ID NO: 37123 - protein, 45 aa, Artificial Sequence
  Quasi-synthetic sequence derived from human genome
ARKLQKNLKTGSFLNRLGKLLLHLFMVLCLTLFLNNIIKKILNLK

SEQ ID NO: 37124 - protein, 45 aa, Artificial Sequence
  Quasi-synthetic sequence derived from human genome
KAVIIQKRVRGWLARTHYKRSMHAIIYLQCCFRRMMAKRELKKLK

SEQ ID NO: 37125 - protein, 45 aa, Artificial Sequence
  Quasi-synthetic sequence derived from human genome
WLIISCSIAYVALVTLLIWVPVKVILHKKRYIYRKIKGWRPVLMM

SEQ ID NO: 37126 - protein, 45 aa, Artificial Sequence
  Quasi-synthetic sequence derived from human genome
ALLQISKLKEVTLFVKRLRRKTYLSNMAKTMRMVLKSKRRVSVLK

SEQ ID NO: 37127 - protein, 45 aa, Artificial Sequence
  Quasi-synthetic sequence derived from human genome
TLPRRRGRPSRRFLGKKYRKYYYKSPKPLLRPFLCRICGSRFLSH

SEQ ID NO: 37128 - protein, 45 aa, Artificial Sequence
  Quasi-synthetic sequence derived from human genome
RRKKKKTIKMLMLVVVLFALCWFPLNCYVLLLSSKVIRTNNALYF

SEQ ID NO: 37129 - protein, 45 aa, Artificial Sequence
  Quasi-synthetic sequence derived from human genome
KAKPKKQSKKKVPFWNVQNKIILFTVFLFILAVIAWTLLWLYISK

SEQ ID NO: 37130 - protein, 45 aa, Artificial Sequence
  Quasi-synthetic sequence derived from human genome
LKSARYFLWHTYRWLLLKLLLLLLLLLLLALFLYSVPGYLVKKIL

SEQ ID NO: 37131 - protein, 45 aa, Artificial Sequence
  Quasi-synthetic sequence derived from human genome
FYFLYGKTRSRIPLVRNRRFQLCRCMNPRARKNRSQIALFQKLRF

SEQ ID NO: 37132 - protein, 45 aa, Artificial Sequence
  Quasi-synthetic sequence derived from human genome
RYFRIQEVLKHARHFRGRKNRCYRLAVRTVIRAFVKCTKARYLKK

SEQ ID NO: 37133 - protein, 45 aa, Artificial Sequence
  Quasi-synthetic sequence derived from human genome
SLKLTCSAFRLQRALRFLLGRLPWRVASGARRFRRWLNRYSYTVL

SEQ ID NO: 37134 - protein, 45 aa, Artificial Sequence
  Quasi-synthetic sequence derived from human genome
LKLPVRSLTYFSARKGKRKTVKAVIDRFLRLHCGLWVRRKAGYKK

SEQ ID NO: 37135 - protein, 45 aa, Artificial Sequence
  Quasi-synthetic sequence derived from human genome
SRRCKKRMFKFHQMKHIFEILDKMRCLRKRSTVSFLGVLVIFLLF

SEQ ID NO: 37136 - protein, 45 aa, Artificial Sequence
  Quasi-synthetic sequence derived from human genome
QKTVKKKIKPTLPLRIFINVSRFFCVQLKKMVRLMYINSFISFPL

SEQ ID NO: 37137 - protein, 45 aa, Artificial Sequence
  Quasi-synthetic sequence derived from human genome
VIRRKVSKIQRFHARSLWTNHKRYGYKKHSYRLVKKLKLQKMKKN

SEQ ID NO: 37138 - protein, 45 aa, Artificial Sequence
  Quasi-synthetic sequence derived from human genome
HKRMKVKKLPMILALHLKRFKYMDQLHRYTKLSYRVVFPLELRLF

SEQ ID NO: 37139 - protein, 45 aa, Artificial Sequence
  Quasi-synthetic sequence derived from human genome
TRPLMSFWCRFRRAFVTVTHRLLLLCLGVVMVCVVLRYMKYRWTK

SEQ ID NO: 37140 - protein, 45 aa, Artificial Sequence
  Quasi-synthetic sequence derived from human genome
VLRALRLLRIFKVTKYWASLRNLVVSLLNSMKSIISLLFLLFLFI

SEQ ID NO: 37141 - protein, 45 aa, Artificial Sequence
  Quasi-synthetic sequence derived from human genome
LARLLRSRAGSRKRPLTLLQRAGLLLLLGLLGFLALLALMSRLGR

SEQ ID NO: 37142 - protein, 45 aa, Artificial Sequence
  Quasi-synthetic sequence derived from human genome
LVLRLLRALRVLYVMRLARHSLGLRSLGLTMRRCAREFGLLLLFL

SEQ ID NO: 37143 - protein, 45 aa, Artificial Sequence
  Quasi-synthetic sequence derived from human genome
ILRIIRLVRVFRIFKLSRHSKGLQILGHTLRASMRELGLLIFFLF

SEQ ID NO: 37144 - protein, 45 aa, Artificial Sequence
  Quasi-synthetic sequence derived from human genome
LFRKWKAFSVWRKNVRSKKITGCQKSLQKNLFIVNPHLRPALLKI

SEQ ID NO: 37145 - protein, 45 aa, Artificial Sequence
  Quasi-synthetic sequence derived from human genome
RRPRPRRELSLGRKKAPHRLCGRFSRISMKLPRIPLRRQKLPKVV

SEQ ID NO: 37146 - protein, 45 aa, Artificial Sequence
  Quasi-synthetic sequence derived from human genome
VLRALRLLRIFKITKYWASLRNLVVSLMSSMKSIISLLFLLFLFI

SEQ ID NO: 37147 - protein, 45 aa, Artificial Sequence
  Quasi-synthetic sequence derived from human genome
KLLKRLRLLPALLILRAFKPHRKIRDYRVVVVGTAGVGKSTLLHK

SEQ ID NO: 37148 - protein, 45 aa, Artificial Sequence
  Quasi-synthetic sequence derived from human genome
KTFRIKRFLAKKQKQNRPIPQWIRMKTGNKIRYNSKRRHWRRTKL

SEQ ID NO: 37149 - protein, 45 aa, Artificial Sequence
  Quasi-synthetic sequence derived from human genome
RRYIENIYHSKPMRWPFFLFIPFFIIFCVLIAIMVKVNFQRKKWR

SEQ ID NO: 37150 - protein, 45 aa, Artificial Sequence
  Quasi-synthetic sequence derived from human genome
KRMRVKKLPMILALHLKRFKYMEQLHRYTKLSYRVVFPLELRLFN

SEQ ID NO: 37151 - protein, 45 aa, Artificial Sequence
  Quasi-synthetic sequence derived from human genome
LKSIKYLICTRYKWLIIKIVLALLGLLMLGLFLYSLPGYMVKKLL

SEQ ID NO: 37152 - protein, 45 aa, Artificial Sequence
  Quasi-synthetic sequence derived from human genome
RLLFAKLFGHLTSARRARKSEVPHFRLKKVQNIKMWLSLRSYLKR

SEQ ID NO: 37153 - protein, 45 aa, Artificial Sequence
  Quasi-synthetic sequence derived from human genome
KSLRVLRVLRPLKTIKRLPKLKAVFDCVVNSLKNVFNILIVYMLF

SEQ ID NO: 37154 - protein, 45 aa, Artificial Sequence
  Quasi-synthetic sequence derived from human genome
KSLRVLRVLRPLKTIKRLPKLKAVFDCVVNSLKNVLNILIVYMLF

SEQ ID NO: 37155 - protein, 45 aa, Artificial Sequence
  Quasi-synthetic sequence derived from human genome
RKYIYIRSCVVIIQKRFRCFQAQKLYKRRKESILTIQKYYKAYLK

SEQ ID NO: 37156 - protein, 45 aa, Artificial Sequence
  Quasi-synthetic sequence derived from human genome
LRPLVKPKIVKKRTKKFIRHQSDRYVKIKRNWRKPRGIDNRVRRR

SEQ ID NO: 37157 - protein, 45 aa, Artificial Sequence
  Quasi-synthetic sequence derived from human genome
LRRRPARTLGLLLLVVLGFLVLRRLDWSTLVPLRLRHRQLGLQAK

SEQ ID NO: 37158 - protein, 45 aa, Artificial Sequence
  Quasi-synthetic sequence derived from human genome
VLRALRLLRIFKVTKYWSSLRNLVVSLLNSMKSIISLLFLLFLFI

SEQ ID NO: 37159 - protein, 45 aa, Artificial Sequence
  Quasi-synthetic sequence derived from human genome
TNPRSLKHLCRLKIRKCMGRLHLRCPVFMSFLPLPNRLKAYVLYK

SEQ ID NO: 37160 - protein, 45 aa, Artificial Sequence
  Quasi-synthetic sequence derived from human genome
ALLVLLALAAWASRWLRRKLRARRKGGAPVHVRHMYSTRRPLRSM

SEQ ID NO: 37161 - protein, 45 aa, Artificial Sequence
  Quasi-synthetic sequence derived from human genome
RCRAYLVRKAFRHRLWAVLTVQAYARGMIARRLHQRLRAEYLWRL

SEQ ID NO: 37162 - protein, 45 aa, Artificial Sequence
  Quasi-synthetic sequence derived from human genome
ALFVYLNRKIVQVMRKQKTINRFLMRKRLLFPALVTLLISTLTFP

SEQ ID NO: 37163 - protein, 45 aa, Artificial Sequence
  Quasi-synthetic sequence derived from human genome
HLKRLVKLHIKRHYHKKFWKLGAVIFFFIIVLVLMQREVSVQYSK

SEQ ID NO: 37164 - protein, 45 aa, Artificial Sequence
  Quasi-synthetic sequence derived from human genome
LLVKLRLCFLVMAYGTTIFHPLLYAFTRQKFQKVLKSKMKKRVVS

SEQ ID NO: 37165 - protein, 45 aa, Artificial Sequence
  Quasi-synthetic sequence derived from human genome
ARKKRSWYLTWKYKLTNQRALRRFCQTGAVLFLLVTVIVNIKLIL

SEQ ID NO: 37166 - protein, 45 aa, Artificial Sequence
  Quasi-synthetic sequence derived from human genome
KCIRAKIQDYHILTRKRIRYRFRRFIQQFSQCKATARNLKLKYLI

SEQ ID NO: 37167 - protein, 45 aa, Artificial Sequence
  Quasi-synthetic sequence derived from human genome
ITLGLLVAGVLVLLVSLGVAIHLCCRRRRARLRFMKQKFNIVCLK

SEQ ID NO: 37168 - protein, 45 aa, Artificial Sequence
  Quasi-synthetic sequence derived from human genome
KIQAMWRRYRAKKYLCKVKAACKIQAWYRCWRAHKEYLAILKAVK

SEQ ID NO: 37169 - protein, 45 aa, Artificial Sequence
  Quasi-synthetic sequence derived from human genome
FYLRGDRGQILVICLIAVMVVFIILVIGVCTCCHPLRKRRKRKKK

SEQ ID NO: 37170 - protein, 45 aa, Artificial Sequence
  Quasi-synthetic sequence derived from human genome
RKYKKNIKALYIVHPTMFIKTLLILFKPLISFKFGQKIFYVNYLS

SEQ ID NO: 37171 - protein, 45 aa, Artificial Sequence
  Quasi-synthetic sequence derived from human genome
LIQAMWRRYRAKKYLCKVKAACKIQAWYRCWRAHKEYLAILKAVK

SEQ ID NO: 37172 - protein, 45 aa, Artificial Sequence
  Quasi-synthetic sequence derived from human genome
KIWWIIRGPMMLCVTVNFFIFLKILKLLISKLKAHQMCFRDYKYR

SEQ ID NO: 37173 - protein, 45 aa, Artificial Sequence
  Quasi-synthetic sequence derived from human genome
WCLCKLLRFFYSLFFPGLIVCGTLCVCLVIVLWGIRLLLQRKKKL

SEQ ID NO: 37174 - protein, 45 aa, Artificial Sequence
  Quasi-synthetic sequence derived from human genome
RRRMPGLGWMKKCYQMIDRRLRKNLKSFIIVHPSWFIRTILAVTR

SEQ ID NO: 37175 - protein, 45 aa, Artificial Sequence
  Quasi-synthetic sequence derived from human genome
LGFIVPFAIIGLCYSLIVRVLVRAHRHRGLRPRRQKALRMILAVV

SEQ ID NO: 37176 - protein, 45 aa, Artificial Sequence
  Quasi-synthetic sequence derived from human genome
AWRRDIFGRIIWHKFKQWVIPWHLNKRYNRKRFFALPYVDHFLRL

SEQ ID NO: 37177 - protein, 45 aa, Artificial Sequence
  Quasi-synthetic sequence derived from human genome
RLARIGRILRLIKGAKGIRTLLFALMMSLPALFNIGLLLFLVMFI

SEQ ID NO: 37178 - protein, 45 aa, Artificial Sequence
  Quasi-synthetic sequence derived from human genome
VFILYFKPSVFRCIALRWVRLLGFAIVYGTIILKLYRVLQLFLSR

SEQ ID NO: 37179 - protein, 45 aa, Artificial Sequence
  Quasi-synthetic sequence derived from human genome
LIPKKFQLNQHRRIKLSPLMMYEKLSMIRFRYRILRSQHFRTKSK

SEQ ID NO: 37180 - protein, 45 aa, Artificial Sequence
  Quasi-synthetic sequence derived from human genome
WRRVLAQRKLLMLKKEKLEKVQNKAASLIQAMWRRYRAKKYLCKV

SEQ ID NO: 37181 - protein, 45 aa, Artificial Sequence
  Quasi-synthetic sequence derived from human genome
RRLRKNLKSLIIVHPSWFIRTLLAVTRPFISSKFSQKIRYVFNLA

SEQ ID NO: 37182 - protein, 45 aa, Artificial Sequence
  Quasi-synthetic sequence derived from human genome
ILRTLFRSRSKRRHRTVKLIFAIVVAYFLSWGPYNFTLFLQTLFR

SEQ ID NO: 37183 - protein, 45 aa, Artificial Sequence
  Quasi-synthetic sequence derived from human genome
VVTAVLILLVVRRLRVPKTPAPDGPRYRFRKRDKVLFYGRKIMRK

SEQ ID NO: 37184 - protein, 45 aa, Artificial Sequence
  Quasi-synthetic sequence derived from human genome
VHLLKIKNTFCLWKRLIKLKDNHCEQLRVKIRKLKNKASVLQKRI

SEQ ID NO: 37185 - protein, 45 aa, Artificial Sequence
  Quasi-synthetic sequence derived from human genome
FLIIVGICLILIVIFMITKFVQDRHRARRNRLRKDQLKKLPVHKF

SEQ ID NO: 37186 - protein, 45 aa, Artificial Sequence
  Quasi-synthetic sequence derived from human genome
VRFLNLKKTIIKFQAHVRKHQQRQKYKKMKKAAVIIQTHFRAYIF

SEQ ID NO: 37187 - protein, 45 aa, Artificial Sequence
  Quasi-synthetic sequence derived from human genome
PGPKAALAVIRGGATRAAGVFYPWRFRLLCLLRRWLPRPRAWFIR

SEQ ID NO: 37188 - protein, 45 aa, Artificial Sequence
  Quasi-synthetic sequence derived from human genome
WHWLLRTGGWKVSAVTLAYLIFCLCSLVGILHLQRALVLRRKRKR

SEQ ID NO: 37189 - protein, 45 aa, Artificial Sequence
  Quasi-synthetic sequence derived from human genome
VVMKFFRWVRRAWQRIISWVFFWRQKIKPTISGHPDSKKHSLKKM

SEQ ID NO: 37190 - protein, 45 aa, Artificial Sequence
  Quasi-synthetic sequence derived from human genome
SRGFLARRRYRKMLEEHKAVILQKYARAWLARRRFQSIRRFVLNI

SEQ ID NO: 37191 - protein, 45 aa, Artificial Sequence
  Quasi-synthetic sequence derived from human genome
LLLLLVVCGIGCVWHWKHRVATRFTLPRFLQRRSSRRKVCTKTFL

SEQ ID NO: 37192 - protein, 45 aa, Artificial Sequence
  Quasi-synthetic sequence derived from human genome
LKAKKAQLMQYLSLPKTPKMLKMSKGLDARSKRWLKIIWRRHGIW

SEQ ID NO: 37193 - protein, 45 aa, Artificial Sequence
  Quasi-synthetic sequence derived from human genome
ILRVIRLVRVFRIFKLSRHSKGLQILGQTLRASMRELGLLIFFLF

SEQ ID NO: 37194 - protein, 45 aa, Artificial Sequence
  Quasi-synthetic sequence derived from human genome
RFLFAKLFSHITSARKARKYEIPHFRLKKVENIKIWLSLRSYLKR

SEQ ID NO: 37195 - protein, 45 aa, Artificial Sequence
  Quasi-synthetic sequence derived from human genome
RLAFQGWLRRGVLLVRAPPACLQVLRDAWRRRALRPPRGFRIRAV

SEQ ID NO: 37196 - protein, 45 aa, Artificial Sequence
  Quasi-synthetic sequence derived from human genome
KLLILLIGTWALFFRKRRADMPRVFVFRALLLVLIFLFVVSYWLF

SEQ ID NO: 37197 - protein, 45 aa, Artificial Sequence
  Quasi-synthetic sequence derived from human genome
RLARIGRVLRLIRGAKGIRTLLFALMMSLPALFNIGLLLFLVMFI

SEQ ID NO: 37198 - protein, 45 aa, Artificial Sequence
  Quasi-synthetic sequence derived from human genome
WLKKCYQMIDRRLRKNLKSLIIVHPSWFIRTVLAISRPFISVKFI

SEQ ID NO: 37199 - protein, 45 aa, Artificial Sequence
  Quasi-synthetic sequence derived from human genome
IILFCSFKIVWSLRRRQQLARQARMKKATRFIMVVAIVFITCYLP

SEQ ID NO: 37200 - protein, 45 aa, Artificial Sequence
  Quasi-synthetic sequence derived from human genome
RKAPLWLRAKFQRLLFKLGCYIQKNCGKFLVVGLLIFGAFAVGLK

SEQ ID NO: 37201 - protein, 45 aa, Artificial Sequence
  Quasi-synthetic sequence derived from human genome
LRKSLKIIYLNSIQQLEIRNMSWPRLIRKLRCYLKEMKNLRKLVF

SEQ ID NO: 37202 - protein, 45 aa, Artificial Sequence
  Quasi-synthetic sequence derived from human genome
FLKLFRAARLIKLLRQGYTIRILLWTFVQSFKALPYVCLLIAMLF

SEQ ID NO: 37203 - protein, 45 aa, Artificial Sequence
  Quasi-synthetic sequence derived from human genome
IRNIGIWFFWIRLYKIRRGRTRPQALLFLCMILLLIVLHTSYMIY

SEQ ID NO: 37204 - protein, 45 aa, Artificial Sequence
  Quasi-synthetic sequence derived from human genome
ILRVIRLVRVFRIFKLSRHSKGLQILGQTLKASMRELGLLIFFLF

SEQ ID NO: 37205 - protein, 45 aa, Artificial Sequence
  Quasi-synthetic sequence derived from human genome
ILRVIRLVRVFRIFKLSRHSKGLQILGKTLQASMRELGLLIFFLF

SEQ ID NO: 37206 - protein, 45 aa, Artificial Sequence
  Quasi-synthetic sequence derived from human genome
LRVIRLVRVFRIFKLSRHSKGLQILGQTLKASMRELGLLIFFLFI

SEQ ID NO: 37207 - protein, 45 aa, Artificial Sequence
  Quasi-synthetic sequence derived from human genome
LRRLRAVRLRSGAKALGKARRKVTVLVLVVLAVCLLCWTPFHLAS

SEQ ID NO: 37208 - protein, 45 aa, Artificial Sequence
  Quasi-synthetic sequence derived from human genome
FKKFYFHQHLCILKAKLGRPVTWNRQLRHFQGRKKALQIQKTWIK

SEQ ID NO: 37209 - protein, 45 aa, Artificial Sequence
  Quasi-synthetic sequence derived from human genome
RLARIGRILRLVKGAKGIRTLLFALMMSLPALFNIGLLLFLVMFI

SEQ ID NO: 37210 - protein, 45 aa, Artificial Sequence
  Quasi-synthetic sequence derived from human genome
IYLRLLVKLYRFLARRTNSTFNQVVLKRLFMSRTNRPPLSLSRMI

SEQ ID NO: 37211 - protein, 45 aa, Artificial Sequence
  Quasi-synthetic sequence derived from human genome
GARLFRIKCVTRIQAYWRGCVVRKWYRNLRKTVPPTDAKLRKKFF

SEQ ID NO: 37212 - protein, 45 aa, Artificial Sequence
  Quasi-synthetic sequence derived from human genome
LKRATLKNLRKQYRNVKKMTAKELVKVLFSFFWMLFVGLFQLLFT

SEQ ID NO: 37213 - protein, 45 aa, Artificial Sequence
  Quasi-synthetic sequence derived from human genome
TKINLAVANTGILVFQGFTKINAFNWAKVRKLSFKRKRFLIKLRP

SEQ ID NO: 37214 - protein, 45 aa, Artificial Sequence
  Quasi-synthetic sequence derived from human genome
FFLIAVRLASLNQILDPWVYLLLRKILLRKFCQMRKRRLREQLIC

SEQ ID NO: 37215 - protein, 45 aa, Artificial Sequence
  Quasi-synthetic sequence derived from human genome
QKECNFFLIAVRLASLNQILDPWVYLLLRKILLRKFCQMRKRRLR

SEQ ID NO: 37216 - protein, 45 aa, Artificial Sequence
  Quasi-synthetic sequence derived from human genome
RKYKKNLKALYVVHPTSFIKVLWNILKPLISHKFGKKVIYFNYLS

SEQ ID NO: 37217 - protein, 45 aa, Artificial Sequence
  Quasi-synthetic sequence derived from human genome
AGKLLSVFRQPLSSLWRSLVPLFCWLRATFWLLATKRRKQQLVLR

SEQ ID NO: 37218 - protein, 45 aa, Artificial Sequence
  Quasi-synthetic sequence derived from human genome
QHARTPLIAAGVIGGLFILVIVGLTFAVYVRRKSIKKKRALRRFL

SEQ ID NO: 37219 - protein, 45 aa, Artificial Sequence
  Quasi-synthetic sequence derived from human genome
KRCIVLVTELMTSGTLKTYLKRFKVMKPKVLRSWCRQILKGLLFL

SEQ ID NO: 37220 - protein, 45 aa, Artificial Sequence
  Quasi-synthetic sequence derived from human genome
IFPRLARHDRGNYVRLNMKQKHYVRGRALRSRLLRKQAWKQKWRK

SEQ ID NO: 37221 - protein, 45 aa, Artificial Sequence
  Quasi-synthetic sequence derived from human genome
WRRRHWAVKMVTCFIIGLLFPVFSVCYLIAPKSPLGLFIRKPFIK

SEQ ID NO: 37222 - protein, 45 aa, Artificial Sequence
  Quasi-synthetic sequence derived from human genome
QIPKRKRKAKKRRKNDVVVVKGKLKLCSISGLIALCGILVLLVGI

SEQ ID NO: 37223 - protein, 45 aa, Artificial Sequence
  Quasi-synthetic sequence derived from human genome
RRPDTSFLWFTSPYKTMKFILWRRFRWAIILFIILFILLLFLAIF

SEQ ID NO: 37224 - protein, 45 aa, Artificial Sequence
  Quasi-synthetic sequence derived from human genome
LARKAFAKKQQQLSALKVLQRNCAAYLKLRHWQWWRVFTKVKPLL

SEQ ID NO: 37225 - protein, 45 aa, Artificial Sequence
  Quasi-synthetic sequence derived from human genome
LGKKVLNLLKGAFPARLKKVLIVGAPIWFRVPYSIISLLLKDKVR

SEQ ID NO: 37226 - protein, 45 aa, Artificial Sequence
  Quasi-synthetic sequence derived from human genome
LAFRKAKIRDRVSKLLASVILLPWPPKVLGLKNVTGRLLVGLRWW

SEQ ID NO: 37227 - protein, 45 aa, Artificial Sequence
  Quasi-synthetic sequence derived from human genome
IKIFRFVAPLYYINKECFKSALYKQTVNPILIKVAWKKAAKRKIK

SEQ ID NO: 37228 - protein, 45 aa, Artificial Sequence
  Quasi-synthetic sequence derived from human genome
KKPSFMVIRFPGRRGYGRLRPRARSLSKASTAINWLTKKFLLKKA

SEQ ID NO: 37229 - protein, 45 aa, Artificial Sequence
  Quasi-synthetic sequence derived from human genome
RFLGRHFPRFYVLYTIFMKGLQMLWADAKKARRIKTNMWKHNIKF

SEQ ID NO: 37230 - protein, 45 aa, Artificial Sequence
  Quasi-synthetic sequence derived from human genome
IVLLCVMNLIILVNLIHLFIFRKSNFIFDKLHKVGIKTRRQWRRS

SEQ ID NO: 37231 - protein, 45 aa, Artificial Sequence
  Quasi-synthetic sequence derived from human genome
MRFQQFLFAFFIFIMSLLLISGQRPVNLTMRRKLRKHNCLQRRCM

SEQ ID NO: 37232 - protein, 45 aa, Artificial Sequence
  Quasi-synthetic sequence derived from human genome
RPLLLQKLLKDGGVLSPILTRLMNFFVFSRGLLQYINQRKKFRRR

SEQ ID NO: 37233 - protein, 45 aa, Artificial Sequence
  Quasi-synthetic sequence derived from human genome
LCWGALAAQLALLGLGLLHALLLVLLLCRLRRLRARARARAAARL

SEQ ID NO: 37234 - protein, 45 aa, Artificial Sequence
  Quasi-synthetic sequence derived from human genome
LARKAFAKRQQQLTAMKVLQRNCAAYLKLRNWQWWRLFTKVKPLL

SEQ ID NO: 37235 - protein, 45 aa, Artificial Sequence
  Quasi-synthetic sequence derived from human genome
RAVLDVANHFSRLKIHFTKVFSAFALVRTIRYLYRRLQRMLGLRR

SEQ ID NO: 37236 - protein, 45 aa, Artificial Sequence
  Quasi-synthetic sequence derived from human genome
RISILLRDLPTLKAAVIVAFAFTTLLIACLLLRVFRSGKRLKKTR

SEQ ID NO: 37237 - protein, 45 aa, Artificial Sequence
  Quasi-synthetic sequence derived from human genome
CKTHCLATKKLDLWRLPPILIIHLKRFQFVNGRWIKSQKIVKFPR

SEQ ID NO: 37238 - protein, 45 aa, Artificial Sequence
  Quasi-synthetic sequence derived from human genome
IKQFVWYTPPTFMIAVFLPIVVLIFKSILFLPCLRKKILKIRHGW

SEQ ID NO: 37239 - protein, 45 aa, Artificial Sequence
  Quasi-synthetic sequence derived from human genome
FKCLYYLIWKNYKKYIIIAFILIILIIFLVLFIYTLPGAISRRIV

SEQ ID NO: 37240 - protein, 45 aa, Artificial Sequence
  Quasi-synthetic sequence derived from human genome
APNIPKLNRFLLLFIGFVCVLLSFFMARVFMRMKLPRSLALLPRL

SEQ ID NO: 37241 - protein, 45 aa, Artificial Sequence
  Quasi-synthetic sequence derived from human genome
RIIFPFGFKFNIAVGLILCISLVILTFQWRFYLSFRKLMRWILIL

SEQ ID NO: 37242 - protein, 45 aa, Artificial Sequence
  Quasi-synthetic sequence derived from human genome
QRRRRAMRAFRMLLYSKSTSLTFHWKLWGRHRGRRRGLAHPKNHL

SEQ ID NO: 37243 - protein, 45 aa, Artificial Sequence
  Quasi-synthetic sequence derived from human genome
LARKAFAKRQQQLTAMKVIQRNCAAYLKLRNWQWWRLFTKVKPLL

SEQ ID NO: 37244 - protein, 45 aa, Artificial Sequence
  Quasi-synthetic sequence derived from human genome
AHMGVLVLRGNTKINTFNWAKIRKLSFKRKHFLIKLHANILVLCK

SEQ ID NO: 37245 - protein, 45 aa, Artificial Sequence
  Quasi-synthetic sequence derived from human genome
RIPREHVHNASAHLTFNKFWRRYGKLSRHLMKVKLKKYTKFLFVR

SEQ ID NO: 37246 - protein, 45 aa, Artificial Sequence
  Quasi-synthetic sequence derived from human genome
LSQIKFSPVAKKLFVVTAVSAISVIFLAHHFKRKRGKKKGKILPW

SEQ ID NO: 37247 - protein, 45 aa, Artificial Sequence
  Quasi-synthetic sequence derived from human genome
ASSRRRGFGLFFFLRLHRLLLLFLVLRGTLANKLNVPQVLLPFGR

SEQ ID NO: 37248 - protein, 45 aa, Artificial Sequence
  Quasi-synthetic sequence derived from human genome
LRRAIVFTRQLVTYIVVGVTLRPAILVIPCLLLIKCHLKLYRTKL

SEQ ID NO: 37249 - protein, 45 aa, Artificial Sequence
  Quasi-synthetic sequence derived from human genome
MKHFLRMLIQVCLYFYCKFLWRCLKFVMRKLTGRCELQRICYNTK

SEQ ID NO: 37250 - protein, 45 aa, Artificial Sequence
  Quasi-synthetic sequence derived from human genome
LRTFRLLRVLKLVRFMPALRRQLVVLMKTMDNVATFCMLLMLFIF

SEQ ID NO: 37251 - protein, 45 aa, Artificial Sequence
  Quasi-synthetic sequence derived from human genome
KLVSPKWKNFKGLKLLCRDKIRLNNAIWRAWYIQYVKRRKSPVCG

SEQ ID NO: 37252 - protein, 45 aa, Artificial Sequence
  Quasi-synthetic sequence derived from human genome
LLKKRAAFTKLRRAAILRRERQQKAPRHPLADILHRGCPLLRRWL

SEQ ID NO: 37253 - protein, 45 aa, Artificial Sequence
  Quasi-synthetic sequence derived from human genome
ISVVKILRVLRVLRPLRAINRAKGLKHVVQCVFVAIRTIGNIMIV

SEQ ID NO: 37254 - protein, 45 aa, Artificial Sequence
  Quasi-synthetic sequence derived from human genome
KDGLPGRVPLWVILLSAFAGLLLLMLLILALWKIGFFKRPLKKKM

SEQ ID NO: 37255 - protein, 45 aa, Artificial Sequence
  Quasi-synthetic sequence derived from human genome
PILKRALKVKQAMLQLYVLKLLKLQTKYLGRQWRKSNMKTMSAIY

SEQ ID NO: 37256 - protein, 45 aa, Artificial Sequence
  Quasi-synthetic sequence derived from human genome
RQKVSGILQRVLLLFRAAQCSFPVAQWYILQLRWARKVMQKIRMK

SEQ ID NO: 37257 - protein, 45 aa, Artificial Sequence
  Quasi-synthetic sequence derived from human genome
ILMFFNKDLRRNKAALLFWHILLLGPIVRCLHTIRNYHKWLKNLK

SEQ ID NO: 37258 - protein, 45 aa, Artificial Sequence
  Quasi-synthetic sequence derived from human genome
LVRPRVFIKDMAPGKVVPMNCWGVYQAVRWLRWKASLIKLRALRR

SEQ ID NO: 37259 - protein, 45 aa, Artificial Sequence
  Quasi-synthetic sequence derived from human genome
KFMRFMMMRAENFFILRRKPVEQKKIFTIQGCYPVIRCLLRRRGW

SEQ ID NO: 37260 - protein, 45 aa, Artificial Sequence
  Quasi-synthetic sequence derived from human genome
LQMVLQRRKFLQMKRRKYGFIYKTHLFGRPTVRVMGADNVRRILL

SEQ ID NO: 37261 - protein, 45 aa, Artificial Sequence
  Quasi-synthetic sequence derived from human genome
RWEGSAPRRLLLALHRRLRGLRRAAAGTSRLLFQRLLPCGVIKFR

SEQ ID NO: 37262 - protein, 45 aa, Artificial Sequence
  Quasi-synthetic sequence derived from human genome
LKIVILGLVLPLLVMVICYSGILKTLLRCRNEKKRHRAVRLIFTI

SEQ ID NO: 37263 - protein, 45 aa, Artificial Sequence
  Quasi-synthetic sequence derived from human genome
RPKTSFNWFVNPLKTFVFFIWRRYWRTLVLLLLVLLTVFLLLVFY

SEQ ID NO: 37264 - protein, 45 aa, Artificial Sequence
  Quasi-synthetic sequence derived from human genome
RVAKKRAPKVLGTTLVVGLLAGVGYFAFMLFRKRLGSMILAFRPR

SEQ ID NO: 37265 - protein, 45 aa, Artificial Sequence
  Quasi-synthetic sequence derived from human genome
KPVFMFCKAIRFSYPSIHPFILIWGNKKLKQTFLSVLRQVRYWVK

SEQ ID NO: 37266 - protein, 45 aa, Artificial Sequence
  Quasi-synthetic sequence derived from human genome
LMDRTPLIAAGVIGGLFILVIVGLTFAVYVRRKSIKKKRALRRFL

SEQ ID NO: 37267 - protein, 45 aa, Artificial Sequence
  Quasi-synthetic sequence derived from human genome
WRRKHWVVKLLTCMTIGFLFPMLSIAYLISPRSNLGLFIKKPFIK

SEQ ID NO: 37268 - protein, 45 aa, Artificial Sequence
  Quasi-synthetic sequence derived from human genome
ILGLFLLALLGLVVKRAVERRKALSRRARRLAVRMRALESSQRPR

SEQ ID NO: 37269 - protein, 45 aa, Artificial Sequence
  Quasi-synthetic sequence derived from human genome
RKLLIQAAIVRIMKMRKVLKHQQLLGEVLTQLSSRFKPRVPVIKK

SEQ ID NO: 37270 - protein, 45 aa, Artificial Sequence
  Quasi-synthetic sequence derived from human genome
KSCKPIPVMLLGVTLLKKKYPLAKYLCVLLIVAGVALFMYKPKKV

SEQ ID NO: 37271 - protein, 45 aa, Artificial Sequence
  Quasi-synthetic sequence derived from human genome
LPKYKKNLKALYVVHPTSFIKVLWNILKPLISHKFGKKVIYFNYL

SEQ ID NO: 37272 - protein, 45 aa, Artificial Sequence
  Quasi-synthetic sequence derived from human genome
KILRVLRVLRPLRAINRAKGLKHVVQCVFVAIRTIGNIVIVTTLL

SEQ ID NO: 37273 - protein, 45 aa, Artificial Sequence
  Quasi-synthetic sequence derived from human genome
ILRRKLYIHRVTLRKLLPGVQYVYRCGSAQGWSRRFRFRALKNGA

SEQ ID NO: 37274 - protein, 45 aa, Artificial Sequence
  Quasi-synthetic sequence derived from human genome
NGPKIPSIATGMVGALLLLLVVALGIGLFMRRRHIVRKRTLRRLL

SEQ ID NO: 37275 - protein, 45 aa, Artificial Sequence
  Quasi-synthetic sequence derived from human genome
RRRCCRLCIWLLQTLVHLLQLGQVWRYLRALYLGLQSRWRGERLR

SEQ ID NO: 37276 - protein, 45 aa, Artificial Sequence
  Quasi-synthetic sequence derived from human genome
FALRMKIKEVKKENGDKKIVPKKKKPLKLGPIKKKDLKKLVLYLK

SEQ ID NO: 37277 - protein, 45 aa, Artificial Sequence
  Quasi-synthetic sequence derived from human genome
LVKRLHKVLRPFLLRRVKVDVEKQMPKKYEHVIRCRLSKRQRCLY

SEQ ID NO: 37278 - protein, 45 aa, Artificial Sequence
  Quasi-synthetic sequence derived from human genome
KKCIVLVTELMTSGTLKTYLKRFKVMKIKVLRSWCRQILKGLQFL

SEQ ID NO: 37279 - protein, 45 aa, Artificial Sequence
  Quasi-synthetic sequence derived from human genome
HLLKIKNTFCLWKRLIKLKDNHCEQLRVKIRKLKNKASVLQKRIS

SEQ ID NO: 37280 - protein, 45 aa, Artificial Sequence
  Quasi-synthetic sequence derived from human genome
LKLHFTCQRILFLKPSCMLEVITWPIQAFVKRKVIIFLKKCLLCK

SEQ ID NO: 37281 - protein, 45 aa, Artificial Sequence
  Quasi-synthetic sequence derived from human genome
NYWLKLVKGILPLVGMAMVPALLGLIGYHLYRKANRPKVSKKKLK

SEQ ID NO: 37282 - protein, 45 aa, Artificial Sequence
  Quasi-synthetic sequence derived from human genome
IIFFAFVLLLSGALAYCLALQLYVRRRKKLPSVLLFKKPSPFIFI

SEQ ID NO: 37283 - protein, 45 aa, Artificial Sequence
  Quasi-synthetic sequence derived from human genome
RKNTLARRKGRHMGIGKRKGTANARMPEKVTWMRRMRILRRLLRR

SEQ ID NO: 37284 - protein, 45 aa, Artificial Sequence
  Quasi-synthetic sequence derived from human genome
LLVVVTWRVCQKSHCFRLGRQLSKALQVNCVVRKLLVQLRRLYWW

SEQ ID NO: 37285 - protein, 45 aa, Artificial Sequence
  Quasi-synthetic sequence derived from human genome
WWRFLVIWILFSAVTAFVTFRATRKPLVQTTPRLVYKWFLLIYKI

SEQ ID NO: 37286 - protein, 45 aa, Artificial Sequence
  Quasi-synthetic sequence derived from human genome
KRRMSVGQQTWALLCKNCLKKWRMKRQTLLEWLFSFLLVLFLYLF

SEQ ID NO: 37287 - protein, 45 aa, Artificial Sequence
  Quasi-synthetic sequence derived from human genome
MGFVRQIQLLLWKNWTLRKRQKIRFVVELVWPLSLFLVLIWLRNA

SEQ ID NO: 37288 - protein, 45 aa, Artificial Sequence
  Quasi-synthetic sequence derived from human genome
MKTLRLRKNTVKFSLYRHFKNTLIFAVLASIVFMGWTTKTFRIAK

SEQ ID NO: 37289 - protein, 45 aa, Artificial Sequence
  Quasi-synthetic sequence derived from human genome
AVILQAAFRGMKTRRHLKSMHSSATLIQSRFRSLLVRRRFISLKK

SEQ ID NO: 37290 - protein, 45 aa, Artificial Sequence
  Quasi-synthetic sequence derived from human genome
MKIFKCYFKHTLQQKVFILFLTLWLLSLLKLLNVRRLFPQKDIYL

SEQ ID NO: 37291 - protein, 45 aa, Artificial Sequence
  Quasi-synthetic sequence derived from human genome
KTLRRQLQRQHKCAIIIQSYYRMHVQQKKWKIMKKAALLIQKYYR

SEQ ID NO: 37292 - protein, 45 aa, Artificial Sequence
  Quasi-synthetic sequence derived from human genome
IERRRNTPFHERFFRFLLRKLYVFRRSFLMTCISLRNLILGRPSL

SEQ ID NO: 37293 - protein, 45 aa, Artificial Sequence
  Quasi-synthetic sequence derived from human genome
LRVLRMMRIFWVIKLARHFIGLQTLGLTLKRCYREMVMLLVFICV

SEQ ID NO: 37294 - protein, 45 aa, Artificial Sequence
  Quasi-synthetic sequence derived from human genome
LRTFRLLRVLKLVRFLPALRRQLVVLVKTMDNVATFCTLLMLFIF

SEQ ID NO: 37295 - protein, 45 aa, Artificial Sequence
  Quasi-synthetic sequence derived from human genome
LYRFLARRTNSTFNQVVLKRLFMSRTNRPPLSLSRMIRKMKLPGR

SEQ ID NO: 37296 - protein, 45 aa, Artificial Sequence
  Quasi-synthetic sequence derived from human genome
LRTAMRRQMRRHASRRGPSRRRLGRLWNRLFHRPRAPRGQIPLLT

SEQ ID NO: 37297 - protein, 45 aa, Artificial Sequence
  Quasi-synthetic sequence derived from human genome
MRPRSGGRPGATGRRRRRLRRRPRGLRCSRLPPPPPLPLLLGLLL

SEQ ID NO: 37298 - protein, 45 aa, Artificial Sequence
  Quasi-synthetic sequence derived from human genome
FRLVQASGQKAPRPAARRKARRLLKTVLMILLAFLVCWGPLFGLL

SEQ ID NO: 37299 - protein, 45 aa, Artificial Sequence
  Quasi-synthetic sequence derived from human genome
FVYKLFSLQDLLLLVRCSVQRIETRPRSKKRKKIRRQFPVYVLPK

SEQ ID NO: 37300 - protein, 45 aa, Artificial Sequence
  Quasi-synthetic sequence derived from human genome
TMKLLKLRRNIVKLSLYRHFTNTLILAVAASIVFIIWTTMKFRIV

SEQ ID NO: 37301 - protein, 45 aa, Artificial Sequence
  Quasi-synthetic sequence derived from human genome
LLLVDVVYIFFDIKLLRNIPRWTHLLRLLRLIILLRIFHLFHQKR

SEQ ID NO: 37302 - protein, 45 aa, Artificial Sequence
  Quasi-synthetic sequence derived from human genome
HLRRIRAAVVLQKHYRMQRARQAYQRVRRAAVVIQAFTRAMFVRR

SEQ ID NO: 37303 - protein, 45 aa, Artificial Sequence
  Quasi-synthetic sequence derived from human genome
IRHKCKQRFTKITQYLIRIRKLTLKRQRKLVPLSKKVERREKRRE

SEQ ID NO: 37304 - protein, 45 aa, Artificial Sequence
  Quasi-synthetic sequence derived from human genome
KSVWYRIAFWLQWFNSFVNPLLYPLCHKRFQKAFLKIFCIKKQPL

SEQ ID NO: 37305 - protein, 45 aa, Artificial Sequence
  Quasi-synthetic sequence derived from human genome
LRILHISVMGGMIALLLSILCLVMILYTRRRWCKRRRVPQPQKSA

SEQ ID NO: 37306 - protein, 45 aa, Artificial Sequence
  Quasi-synthetic sequence derived from human genome
ILRGKMMQRRPRSAEVKYFYFFKILLRLRLAILKYLFIDDKGILF

SEQ ID NO: 37307 - protein, 45 aa, Artificial Sequence
  Quasi-synthetic sequence derived from human genome
ARRASRGPIAFWARRASRTRLAAWARRALLSLRSPKARRGKARRR

SEQ ID NO: 37308 - protein, 45 aa, Artificial Sequence
  Quasi-synthetic sequence derived from human genome
KLIRMGPQERWLLRTKRLHWSRLLFLLGMLIIGSTYQHLRRPRGL

SEQ ID NO: 37309 - protein, 45 aa, Artificial Sequence
  Quasi-synthetic sequence derived from human genome
LFALLSRGRRRRMHVLRRRWDLGSLCRALLTRGLAALGHSLKHVL

SEQ ID NO: 37310 - protein, 45 aa, Artificial Sequence
  Quasi-synthetic sequence derived from human genome
RVEIVAAMRRIRYEFKAKNIKKKKVSIMVSVDGVKVILKKKKKKK

SEQ ID NO: 37311 - protein, 45 aa, Artificial Sequence
  Quasi-synthetic sequence derived from human genome
VKQMRARRKTAKMLMVVLLVFALCYLPISVLNVLKRVFGMFRQAS

SEQ ID NO: 37312 - protein, 45 aa, Artificial Sequence
  Quasi-synthetic sequence derived from human genome
FQRALALFVITCLVIFVLVHSFLKKLLGKKLTRCLKPFENSRLRL

SEQ ID NO: 37313 - protein, 45 aa, Artificial Sequence
  Quasi-synthetic sequence derived from human genome
LLVAGVLVLLVSLGVAIHLCCRRRRARLRFMKQLRLHPLEKCSRM

SEQ ID NO: 37314 - protein, 45 aa, Artificial Sequence
  Quasi-synthetic sequence derived from human genome
RRGRRRTRAAGSLLSRAAILLFISAFLVRVPSSVGHLVRLPRAFR

SEQ ID NO: 37315 - protein, 45 aa, Artificial Sequence
  Quasi-synthetic sequence derived from human genome
LKKKLFKRRRVLNRERRLRHRVVGAVIDQGLITRHHLKKRASSAR

SEQ ID NO: 37316 - protein, 45 aa, Artificial Sequence
  Quasi-synthetic sequence derived from human genome
FLRVVRFVRILRIFKLTRHFVGLRVLGHTLRASTNEFLLLIIFLA

SEQ ID NO: 37317 - protein, 45 aa, Artificial Sequence
  Quasi-synthetic sequence derived from human genome
RRRRRGRTDGRRFLLRRAVPGHLGLARARVERAWLAAGLLKVPLR

SEQ ID NO: 37318 - protein, 45 aa, Artificial Sequence
  Quasi-synthetic sequence derived from human genome
HISTRSIAIIVPLVLLVTLITTLVIGLVLCKRKRRTKTIRRQPII

SEQ ID NO: 37319 - protein, 45 aa, Artificial Sequence
  Quasi-synthetic sequence derived from human genome
RAGVTLRVLRMMRIFWVIKLARHFIGLQTLGLTLKRCYREMVMLL

SEQ ID NO: 37320 - protein, 45 aa, Artificial Sequence
  Quasi-synthetic sequence derived from human genome
LSGLSSKAARDVLGFLRVVRFVRILRIFKLTRHFVGLRVLGHTLR

SEQ ID NO: 37321 - protein, 45 aa, Artificial Sequence
  Quasi-synthetic sequence derived from human genome
LRSKKAVWHKLLSKQRKRAVVACFRMAPLYNLPRHRSINLFLHGY

SEQ ID NO: 37322 - protein, 45 aa, Artificial Sequence
  Quasi-synthetic sequence derived from human genome
KHFEKKKDIRRGIGYLKLICFLIPFLLSLKKKMKVPYLSSLLQPF

SEQ ID NO: 37323 - protein, 45 aa, Artificial Sequence
  Quasi-synthetic sequence derived from human genome
ILRRVLVLMASKHAFLALCALRFKRKIIGLKDEFYNRYIMKSFLF

SEQ ID NO: 37324 - protein, 45 aa, Artificial Sequence
  Quasi-synthetic sequence derived from human genome
ERARPGAWRRDIFGRIIWHKFKQWVIPWHLNKRYNRKRFFALPYV

SEQ ID NO: 37325 - protein, 45 aa, Artificial Sequence
  Quasi-synthetic sequence derived from human genome
RKHLNKLRNIRYGFNTILVILIWRIFIARSQMARNIWYFVVSLCY

SEQ ID NO: 37326 - protein, 45 aa, Artificial Sequence
  Quasi-synthetic sequence derived from human genome
WLLLVLVLVLLVSPRGCRARRGLRGLLMAHSQRLLFRIGYSLYTR

SEQ ID NO: 37327 - protein, 45 aa, Artificial Sequence
  Quasi-synthetic sequence derived from human genome
KTFKIKQFLAKKQKQNRPIPQWIRMKTGNKIRYNSKRRHWKRTKL

SEQ ID NO: 37328 - protein, 45 aa, Artificial Sequence
  Quasi-synthetic sequence derived from human genome
TWIQYHSLDVIAFLLACVATVIFIITKFCLFCFRKLAKKGKKKKR

SEQ ID NO: 37329 - protein, 45 aa, Artificial Sequence
  Quasi-synthetic sequence derived from human genome
KLFQALKLNLFGLVLPLLVMIICYTGIIKILLRRPNEKKSKAVRL

SEQ ID NO: 37330 - protein, 45 aa, Artificial Sequence
  Quasi-synthetic sequence derived from human genome
KAALAVIRGGATRAAGVFYPWRFRLLCLLRRWLPRPRAWFIRQEL

SEQ ID NO: 37331 - protein, 45 aa, Artificial Sequence
  Quasi-synthetic sequence derived from human genome
IFQGCLYLIYNLLQAVFFVLFVLSVHYLWKKWKKHQKKLKKQASL

SEQ ID NO: 37332 - protein, 45 aa, Artificial Sequence
  Quasi-synthetic sequence derived from human genome
AVLLLKKLKAWNDIKKVYASQRMRAGKGKMRNRRRIQRRGPCIIY

SEQ ID NO: 37333 - protein, 45 aa, Artificial Sequence
  Quasi-synthetic sequence derived from human genome
RMIRKHVRKNYMKFKAKFSLIQFHRIIESAILSFTSLIKHLNLHK

SEQ ID NO: 37334 - protein, 45 aa, Artificial Sequence
  Quasi-synthetic sequence derived from human genome
ALSIQKVLRGYRYRKEFLRQRRAAVTLQAWWRGYCNRRNFKLILV

SEQ ID NO: 37335 - protein, 45 aa, Artificial Sequence
  Quasi-synthetic sequence derived from human genome
KTKAINGKYHRFLGRHFPRFYVLYTIFMKGLQMLWADAKKARRIK

SEQ ID NO: 37336 - protein, 45 aa, Artificial Sequence
  Quasi-synthetic sequence derived from human genome
VRKILLLQSWFRMVLERRHFLQMKRAAVTIQACWRSYRVRRALER

SEQ ID NO: 37337 - protein, 45 aa, Artificial Sequence
  Quasi-synthetic sequence derived from human genome
WRRVLAQRKLLMLKKEKLEKVQNKAASLIQGYWRRYSTRQRFLKL

SEQ ID NO: 37338 - protein, 45 aa, Artificial Sequence
  Quasi-synthetic sequence derived from human genome
LSGLSSKAAKDVLGFLRVVRFVRILRIFKLTRHFVGLRVLGHTLR

SEQ ID NO: 37339 - protein, 45 aa, Artificial Sequence
  Quasi-synthetic sequence derived from human genome
KVAARMVWRLLHGQVLTRRERRRLLRTCVDFFRLVPFMVFLIVPF

SEQ ID NO: 37340 - protein, 45 aa, Artificial Sequence
  Quasi-synthetic sequence derived from human genome
AIIKIQAWARMWAARRQYLRRLHYFQKNVNSIVKIQAFFRARKAQ

SEQ ID NO: 37341 - protein, 45 aa, Artificial Sequence
  Quasi-synthetic sequence derived from human genome
RENVLVKRKRTKGKKLLLSIGVLLHKWKNVCIVLTALNFPSILLL

SEQ ID NO: 37342 - protein, 45 aa, Artificial Sequence
  Quasi-synthetic sequence derived from human genome
HPRMGVGCRLSRALLTAVTNVLIFFWCLAFLWGLLILLKYRWRKL

SEQ ID NO: 37343 - protein, 45 aa, Artificial Sequence
  Quasi-synthetic sequence derived from human genome
LLRLLRLIILLRIFHLFHQKRQLEKLIRRRVSENKRRYTRDGFDL

SEQ ID NO: 37344 - protein, 45 aa, Artificial Sequence
  Quasi-synthetic sequence derived from human genome
KMRQAWKSWLIYVVVRRTKLQMQTTALEFRQRIILRVWWSTWRQR

SEQ ID NO: 37345 - protein, 45 aa, Artificial Sequence
  Quasi-synthetic sequence derived from human genome
RTLRKPKRVPSIYKLKLRPRIRPRRDHRPEKQPSRIPRPLAYVFL

SEQ ID NO: 37346 - protein, 45 aa, Artificial Sequence
  Quasi-synthetic sequence derived from human genome
LKGKKCIVLVTELMTSGTLKTYLKRFKVMKPKVLRSWCRQILKGL

SEQ ID NO: 37347 - protein, 45 aa, Artificial Sequence
  Quasi-synthetic sequence derived from human genome
ILKPVQKLFAIIVGRGIRKWWQALPPNKKEVVKENIRKNKWKLFL

SEQ ID NO: 37348 - protein, 45 aa, Artificial Sequence
  Quasi-synthetic sequence derived from human genome
TKNLLCLFCLKLFKTAIPYMNHCWRHSRRRVLQCSKCRLQFLTLK

SEQ ID NO: 37349 - protein, 45 aa, Artificial Sequence
  Quasi-synthetic sequence derived from human genome
KFFLYVCMYVCIREKILLYKTHWMTPIFLKVVINTRRIKHHFKIH

SEQ ID NO: 37350 - protein, 45 aa, Artificial Sequence
  Quasi-synthetic sequence derived from human genome
KIIRTIFKRLKSFICPKLHMGFKSSLRSQLSKYTAKIVNIVLCAI

SEQ ID NO: 37351 - protein, 45 aa, Artificial Sequence
  Quasi-synthetic sequence derived from human genome
RALCLLCFYLKYLNMYASICFLTCISLQRCFFLLKPFRARDWKRR

SEQ ID NO: 37352 - protein, 45 aa, Artificial Sequence
  Quasi-synthetic sequence derived from human genome
LKVKFDQKKRVKLAQGLWLMNWFSVLAGIIIFSLGLFLKIELRKR

SEQ ID NO: 37353 - protein, 45 aa, Artificial Sequence
  Quasi-synthetic sequence derived from human genome
KRFGCLCGKRFAVKPKRDRHIMLTFSLRPFGCGICNKRFKLKHHL

SEQ ID NO: 37354 - protein, 45 aa, Artificial Sequence
  Quasi-synthetic sequence derived from human genome
QARMRGFQARKRYLRRRAALGQLNTILLVAQPLLQRRQRLQLGRW

SEQ ID NO: 37355 - protein, 45 aa, Artificial Sequence
  Quasi-synthetic sequence derived from human genome
KLCSRFLLKCGFITIPWRCIKKCSPLMPRAAVPRFVQQKLYLFLQ

SEQ ID NO: 37356 - protein, 45 aa, Artificial Sequence
  Quasi-synthetic sequence derived from human genome
LLSLKKNKIHSLPDKVFIKYTKLKKIFLQHNCIRHISRKAFFGLC

SEQ ID NO: 37357 - protein, 45 aa, Artificial Sequence
  Quasi-synthetic sequence derived from human genome
KRYPQPRGQKKKKVVKYGMGGMIIVLLICIVWFPLLFMSLIKSVA

SEQ ID NO: 37358 - protein, 45 aa, Artificial Sequence
  Quasi-synthetic sequence derived from human genome
WWRLILSKILKKRRQAALEAFSRKEWAAVTLQSQARMWRIRRRYC

SEQ ID NO: 37359 - protein, 45 aa, Artificial Sequence
  Quasi-synthetic sequence derived from human genome
TELYMCHKCKKKQKSTKKFWIQKLPKVLCLHLKRFHWTAYLRNKV

SEQ ID NO: 37360 - protein, 45 aa, Artificial Sequence
  Quasi-synthetic sequence derived from human genome
RRMPGLGWMKKCYQMIDRRLRKNLKSFIIVHPSWFIRTILAVTRP

SEQ ID NO: 37361 - protein, 45 aa, Artificial Sequence
  Quasi-synthetic sequence derived from human genome
RGWLVRKRFLEQRAKIRLLHFTAAAYYHLNAVRIQRAYKLYLAVK

SEQ ID NO: 37362 - protein, 45 aa, Artificial Sequence
  Quasi-synthetic sequence derived from human genome
KSVLQFQNVRRVVQIFRIMRILRILKLARHSTGLQSLGFTLRRSY

SEQ ID NO: 37363 - protein, 45 aa, Artificial Sequence
  Quasi-synthetic sequence derived from human genome
KLSKRQLFFRKKLLHSSQMLRAVSLGQDRYRRRYWVLPYLAGIFV

SEQ ID NO: 37364 - protein, 45 aa, Artificial Sequence
  Quasi-synthetic sequence derived from human genome
RKIVQVMRKQKTINRFLMRKRLLFPALVTLLISTLTFPPGFGQFM

SEQ ID NO: 37365 - protein, 45 aa, Artificial Sequence
  Quasi-synthetic sequence derived from human genome
LAILLVVAVFCILWNWNKRKKRQVPYLRVTVMPLLTLPQTRQRAK

SEQ ID NO: 37366 - protein, 45 aa, Artificial Sequence
  Quasi-synthetic sequence derived from human genome
KRRILFFVVTLVSVFLVWKFTYAHKYLLADNRHYTFYVWKRVFQR

SEQ ID NO: 37367 - protein, 45 aa, Artificial Sequence
  Quasi-synthetic sequence derived from human genome
IHILQIRKLRHRLSNFPRLPGILAPETVLLPFCYKVFRKKEKVKR

SEQ ID NO: 37368 - protein, 45 aa, Artificial Sequence
  Quasi-synthetic sequence derived from human genome
RAVILHFFRGLLYWKNTLALAAILVLLRVRQCLSLRPAPAMRVAR

SEQ ID NO: 37369 - protein, 45 aa, Artificial Sequence
  Quasi-synthetic sequence derived from human genome
FRGWVALVLHLRAHSAAKRPIACPKCERRFWRRKQLRAHLRRCHP

SEQ ID NO: 37370 - protein, 45 aa, Artificial Sequence
  Quasi-synthetic sequence derived from human genome
FRWMRLRIRRMADAWIQAIKSLAEKQNLEKRKRKKVLVHLGLLTK

SEQ ID NO: 37371 - protein, 45 aa, Artificial Sequence
  Quasi-synthetic sequence derived from human genome
IVTANPWNTIALLCGAFLALFKAAEFAKLSIKWMIKIRKRYLKRR

SEQ ID NO: 37372 - protein, 45 aa, Artificial Sequence
  Quasi-synthetic sequence derived from human genome
KYWDYRYKKNLKALYVVHPTSFIKVLWNILKPLISHKFGKKVIYF

SEQ ID NO: 37373 - protein, 45 aa, Artificial Sequence
  Quasi-synthetic sequence derived from human genome
LVGVLLFSKLVLKLPWTQVGFSLLFLYLGSGGWRFIRVFIKTIRR

SEQ ID NO: 37374 - protein, 45 aa, Artificial Sequence
  Quasi-synthetic sequence derived from human genome
KNRPRRRFLCHLSRQQLRMAMRIPVLYEQLKREKLRVHKARQWKY

SEQ ID NO: 37375 - protein, 45 aa, Artificial Sequence
  Quasi-synthetic sequence derived from human genome
LKFHIRRFIFLFFILVIGIYPSGHSLILILGNPKLKQNAKKFLLH

SEQ ID NO: 37376 - protein, 45 aa, Artificial Sequence
  Quasi-synthetic sequence derived from human genome
LLLQGLFIVLILVGYISVKVMLKSIKTRLGRRVPAAPPALRRNLL

SEQ ID NO: 37377 - protein, 45 aa, Artificial Sequence
  Quasi-synthetic sequence derived from human genome
LRLQIIQRERRRKELFRKKNKAAAVIQRAWRSYQLRKHLSHLRHM

SEQ ID NO: 37378 - protein, 45 aa, Artificial Sequence
  Quasi-synthetic sequence derived from human genome
WPRPPPRRFSPPRRMLPPPPMWRRSPPRMRRRSRSPRRRSPVRRR

SEQ ID NO: 37379 - protein, 45 aa, Artificial Sequence
  Quasi-synthetic sequence derived from human genome
FYRNKLKYLAFLRKRMNTNPSRGPYHFRAPSRIFWRTVRGMLPHK

SEQ ID NO: 37380 - protein, 45 aa, Artificial Sequence
  Quasi-synthetic sequence derived from human genome
KYLRKSLKIIYLNSIQELEIRNMSWPRLIRKLRCYLKEMKNLRKL

SEQ ID NO: 37381 - protein, 45 aa, Artificial Sequence
  Quasi-synthetic sequence derived from human genome
FGVRTSVSVIIALRRAVKRHRERRERQKRVFRMSLLIISTFLLCW

SEQ ID NO: 37382 - protein, 45 aa, Artificial Sequence
  Quasi-synthetic sequence derived from human genome
RLRPRLHFCLVLLLLLVVPAAWGCGPGRVVGSRRRPPRKLVPLAY

SEQ ID NO: 37383 - protein, 45 aa, Artificial Sequence
  Quasi-synthetic sequence derived from human genome
FWVLHFLSNSPNSTVEAFSRSKKKKKKKKKRQCFAFLIYFRLGIK

SEQ ID NO: 37384 - protein, 45 aa, Artificial Sequence
  Quasi-synthetic sequence derived from human genome
YIFVAIFWIVFLLLIVFYTAITKKIFKSHLKSSRNSTSVKKKSSR

SEQ ID NO: 37385 - protein, 45 aa, Artificial Sequence
  Quasi-synthetic sequence derived from human genome
CRTIFLVLLFSQYARNVKFPLPIYKSKKGWTAYKLQLFKMFPIIL

SEQ ID NO: 37386 - protein, 45 aa, Artificial Sequence
  Quasi-synthetic sequence derived from human genome
FQQFSSLTNLPLRKLKFSPIKYGYQPRRNFWPARLATRLLKLRYL

SEQ ID NO: 37387 - protein, 45 aa, Artificial Sequence
  Quasi-synthetic sequence derived from human genome
PTPPKPKLSKFILISSLAILLMVSLLLLSLWKLWRVKKFLIPSVP

SEQ ID NO: 37388 - protein, 45 aa, Artificial Sequence
  Quasi-synthetic sequence derived from human genome
IPRNSTVNIPLFRRFGRQRKIGGRGRIISPYRTPVLRRHRYSIFR

SEQ ID NO: 37389 - protein, 45 aa, Artificial Sequence
  Quasi-synthetic sequence derived from human genome
ARLWGIRKCKPHMNYDKLSRALRYYYNKRILHKTKGKRFTYKFNF

SEQ ID NO: 37390 - protein, 45 aa, Artificial Sequence
  Quasi-synthetic sequence derived from human genome
VVLSIASLIFSAILKSLQSYFSPTLFRVIRLARIGRILRLIRAAK

SEQ ID NO: 37391 - protein, 45 aa, Artificial Sequence
  Quasi-synthetic sequence derived from human genome
FVALLWKRLLIARRSRKGFFAQIVLPAVFVCIALVFSLIVPPFGK

SEQ ID NO: 37392 - protein, 45 aa, Artificial Sequence
  Quasi-synthetic sequence derived from human genome
IRTGKRKKKAWKRMVTKVCFVGDGFTRKPPKYERFIRPMGLRFKK

SEQ ID NO: 37393 - protein, 45 aa, Artificial Sequence
  Quasi-synthetic sequence derived from human genome
LARRAFQKRQQQQSALRVMQRNCAAYLKLRHWQWWRLFTKVKPLL

SEQ ID NO: 37394 - protein, 45 aa, Artificial Sequence
  Quasi-synthetic sequence derived from human genome
FWKHFLTLKMNISVLVLPLFIFTFLYVQMRKTLRFREQRYSLFKL

SEQ ID NO: 37395 - protein, 45 aa, Artificial Sequence
  Quasi-synthetic sequence derived from human genome
PILKRALKVKQAMMQLYVLKLLKVQTKYLGRQWRKSNMKTMSAIY

SEQ ID NO: 37396 - protein, 45 aa, Artificial Sequence
  Quasi-synthetic sequence derived from human genome
VIKYIWRIGTDGRTVRRTMNIVPRTKVKTIKMFLILNLLFLLSWL

SEQ ID NO: 37397 - protein, 45 aa, Artificial Sequence
  Quasi-synthetic sequence derived from human genome
RHHVLTWVKFIIGYLFPLLTMSICYLCLIFKVKKRSILISSRHFW

SEQ ID NO: 37398 - protein, 45 aa, Artificial Sequence
  Quasi-synthetic sequence derived from human genome
LFKNKDHFQFTNLFLCGLLSKAKQKLLRHLVPAAALRRKRKALWA

SEQ ID NO: 37399 - protein, 45 aa, Artificial Sequence
  Quasi-synthetic sequence derived from human genome
RKSQILISSWFRGNMQKKCYGKIKASVLLIQAFVRGWKARKNYRK

SEQ ID NO: 37400 - protein, 45 aa, Artificial Sequence
  Quasi-synthetic sequence derived from human genome
INLAKLKLFRHYYVLIVCYIYFTRIIAFLLKLAVPFQWKWLYQLL

SEQ ID NO: 37401 - protein, 45 aa, Artificial Sequence
  Quasi-synthetic sequence derived from human genome
LLIPYLLGRKRRWSKCKIRVFVGGQINRMDQERKAIISLLSKFRL

SEQ ID NO: 37402 - protein, 45 aa, Artificial Sequence
  Quasi-synthetic sequence derived from human genome
DRFLKIIRPLRNIFLKKPVFAKTVSIFIWFFLFFISLPNTILSNK

SEQ ID NO: 37403 - protein, 45 aa, Artificial Sequence
  Quasi-synthetic sequence derived from human genome
YLKSVQLFSKKFKLWLLNALEGVPALLQISKLKEVTLFVKRLRRK

SEQ ID NO: 37404 - protein, 45 aa, Artificial Sequence
  Quasi-synthetic sequence derived from human genome
KPLPWRSPLLLLAMWGPQAPPCLCRKRGRGACIKCERLRPRIRRR

SEQ ID NO: 37405 - protein, 45 aa, Artificial Sequence
  Quasi-synthetic sequence derived from human genome
IRAKLLREGWVHANRPKRLLLVLVSAFFIFWSPFNVVLLVHLWRR

SEQ ID NO: 37406 - protein, 45 aa, Artificial Sequence
  Quasi-synthetic sequence derived from human genome
VIIIQARSKGFIQKRKFQEIKNSTIKIQAMWRRYRAKKYLCKVKA

SEQ ID NO: 37407 - protein, 45 aa, Artificial Sequence
  Quasi-synthetic sequence derived from human genome
LRFKYLLKQALATGMRRGLLARPLNSKARGATGSFKLVPKHKKKI

SEQ ID NO: 37408 - protein, 45 aa, Artificial Sequence
  Quasi-synthetic sequence derived from human genome
VMMAQILRSHLIKATVIPNRVKMLPYFGIIRNRMMSTHKSKKKIR

SEQ ID NO: 37409 - protein, 45 aa, Artificial Sequence
  Quasi-synthetic sequence derived from human genome
FRYLQRLLLVHGRWSYIRMCKFLRYFFYKNFAFTLVHFWYSFFNG

SEQ ID NO: 37410 - protein, 45 aa, Artificial Sequence
  Quasi-synthetic sequence derived from human genome
LRVMRLMRIFRILKLARHSTGLRAFGFTLRQCYQQVGCLLLFIAM

SEQ ID NO: 37411 - protein, 45 aa, Artificial Sequence
  Quasi-synthetic sequence derived from human genome
LFLYLGSGGWRFIRVFIKTIRRDIFGGLVLLKVKAKVRQCLQERR

SEQ ID NO: 37412 - protein, 45 aa, Artificial Sequence
  Quasi-synthetic sequence derived from human genome
KLLTLQPPGMLWLMERGGLGKPRGPRHRGLLRVRLGRFISRLLLW

SEQ ID NO: 37413 - protein, 45 aa, Artificial Sequence
  Quasi-synthetic sequence derived from human genome
SALARLGLPARPWPRWLGVAALGLAAVALGTVAWRRAWPRRRRRL

SEQ ID NO: 37414 - protein, 45 aa, Artificial Sequence
  Quasi-synthetic sequence derived from human genome
KTFTIKRFLAKKQKQNRPIPQWIQMKPGSKIRYNSKRRHWRRTKL

SEQ ID NO: 37415 - protein, 45 aa, Artificial Sequence
  Quasi-synthetic sequence derived from human genome
RRKCKPQMNYDKLSRALRYYYNKRILHKTKGKRFTYKFNFSKLIV

SEQ ID NO: 37416 - protein, 45 aa, Artificial Sequence
  Quasi-synthetic sequence derived from human genome
LGRHLGVVIGILVAVILLLLLLLLLFLILRHRRQGKHWTSTQRKA

SEQ ID NO: 37417 - protein, 45 aa, Artificial Sequence
  Quasi-synthetic sequence derived from human genome
LLNKLSILASKLAPAMKTQKLRYRRCSSELLPMAKSYKRLRYKRL

SEQ ID NO: 37418 - protein, 45 aa, Artificial Sequence
  Quasi-synthetic sequence derived from human genome
THPFILILGNKKLKQIFLSVLRHVRYWVKDRSLRLHRFTRGALCV

SEQ ID NO: 37419 - protein, 45 aa, Artificial Sequence
  Quasi-synthetic sequence derived from human genome
LGKLKRNMMPWALQKKREIHMAKAHRRRAARSALPMRLTSCIFRR

SEQ ID NO: 37420 - protein, 45 aa, Artificial Sequence
  Quasi-synthetic sequence derived from human genome
KPVFMFCKAIRFSYPSIHPFILIWGNKKLKQTFLSVFWQMRYWVK

SEQ ID NO: 37421 - protein, 45 aa, Artificial Sequence
  Quasi-synthetic sequence derived from human genome
LLLLSIVILYCRIYSLVRTRSRRLTFRKNISKASRSSEKSLALLK

SEQ ID NO: 37422 - protein, 45 aa, Artificial Sequence
  Quasi-synthetic sequence derived from human genome
KLSRALRYYYNKRILHKTKGKRFTYKFNFNKLVMPNYPFINIRSS

SEQ ID NO: 37423 - protein, 45 aa, Artificial Sequence
  Quasi-synthetic sequence derived from human genome
LLIVVKVRSAGRRVWAPSCQRRRRSERRVTRMVVAVVALFVLCWM

SEQ ID NO: 37424 - protein, 45 aa, Artificial Sequence
  Quasi-synthetic sequence derived from human genome
KFIRIFQLSNNIRSVVLRHCKKRQSHLRLTLKNNVFLFIDKLSYR

SEQ ID NO: 37425 - protein, 45 aa, Artificial Sequence
  Quasi-synthetic sequence derived from human genome
ILKLYRVLQLFLSRTAQRSALLSSGRLLRRLGLLLLPVLGFLAVW

SEQ ID NO: 37426 - protein, 45 aa, Artificial Sequence
  Quasi-synthetic sequence derived from human genome
IMRNILGLVLPLLIMVICYSGILKTLLRCRNEKKRHRAVRVIFTI

SEQ ID NO: 37427 - protein, 45 aa, Artificial Sequence
  Quasi-synthetic sequence derived from human genome
MKATGKLYACKKLNKKRLKKRKGYQGAMVEKKILMKVHSRFIVSL

SEQ ID NO: 37428 - protein, 45 aa, Artificial Sequence
  Quasi-synthetic sequence derived from human genome
RAACHLKLKNLHKAIEDSSKAYRIMKRHLRLIHPTKLYKLMLRRF

SEQ ID NO: 37429 - protein, 45 aa, Artificial Sequence
  Quasi-synthetic sequence derived from human genome
KKQRKILWRKGIHLAFSEKWNTGFGGFKKFYFHQHLCILKAKLGR

SEQ ID NO: 37430 - protein, 45 aa, Artificial Sequence
  Quasi-synthetic sequence derived from human genome
CPFCLKLLLPGLLLLLVVIILILAFWVLPKYKTRKAMRNNVPRDR

SEQ ID NO: 37431 - protein, 45 aa, Artificial Sequence
  Quasi-synthetic sequence derived from human genome
RFLFNELRPAVCNDLSIMSKFKLLSSLPRWRRIAQKIIRERRKKR

SEQ ID NO: 37432 - protein, 45 aa, Artificial Sequence
  Quasi-synthetic sequence derived from human genome
TALLRLLGLRRGLRRLRRLWAGPRVQRGRGRGRGRGWGPSRGCVP

SEQ ID NO: 37433 - protein, 45 aa, Artificial Sequence
  Quasi-synthetic sequence derived from human genome
LTVRSALFALRYNILTLMRMLSLKSLKKQMKKVKKMTVKDMVTAF

SEQ ID NO: 37434 - protein, 45 aa, Artificial Sequence
  Quasi-synthetic sequence derived from human genome
IPLRPKHWFQLCRPMNPRARKNCSQIALFQKRRFQFFCSMRCRAW

SEQ ID NO: 37435 - protein, 45 aa, Artificial Sequence
  Quasi-synthetic sequence derived from human genome
VKMAGVIAGLLMFIIILLGVMLTIKRRRNAYSYSYYLSQRKLAKK

SEQ ID NO: 37436 - protein, 45 aa, Artificial Sequence
  Quasi-synthetic sequence derived from human genome
RRMFHATVATQTQFFHVKVLNINLKRKFIKKRIIIISNYSKRNSL

SEQ ID NO: 37437 - protein, 45 aa, Artificial Sequence
  Quasi-synthetic sequence derived from human genome
RVYTLVLGFVLPVCTICVLYTDLLRRLRAVRLRSGAKALGKARRK

SEQ ID NO: 37438 - protein, 45 aa, Artificial Sequence
  Quasi-synthetic sequence derived from human genome
PLLVDVIYIFFDIKLLRNIPRWTHLVRLLRLIILIRIFHLLHQKR

SEQ ID NO: 37439 - protein, 45 aa, Artificial Sequence
  Quasi-synthetic sequence derived from human genome
VITIQAGVRGYLARRRIRLWHRGAMVIQATWRGYRVRRNLAHLCR

SEQ ID NO: 37440 - protein, 45 aa, Artificial Sequence
  Quasi-synthetic sequence derived from human genome
TRFLCGFLVPVLIITACYLTIVCKLQRNRLAKTKKPFKIIVTIII

SEQ ID NO: 37441 - protein, 45 aa, Artificial Sequence
  Quasi-synthetic sequence derived from human genome
ILLRLRLAILKYLFIDDKGILFVSSRKHLPTLPTLLSRLKLFLVK

SEQ ID NO: 37442 - protein, 45 aa, Artificial Sequence
  Quasi-synthetic sequence derived from human genome
IFQVFRERKKFMITPKLIRMVTVMQAHVRGWLERKRLQRVMTKAL

SEQ ID NO: 37443 - protein, 45 aa, Artificial Sequence
  Quasi-synthetic sequence derived from human genome
CWWRMTLSRVLEKKRQAALIAYATRERAVIKLQSLVRMWRVRWRY

SEQ ID NO: 37444 - protein, 45 aa, Artificial Sequence
  Quasi-synthetic sequence derived from human genome
MALSTIVSQRKQIKRKAPRGFLKRVFKRKKPQLRLEKSGDLLVRF

SEQ ID NO: 37445 - protein, 45 aa, Artificial Sequence
  Quasi-synthetic sequence derived from human genome
IFMVKIFMLLVVGITSGMWIWTSKTLQSWQQVCSRRLKKKSRRKP

SEQ ID NO: 37446 - protein, 45 aa, Artificial Sequence
  Quasi-synthetic sequence derived from human genome
FYGRKIMRKVTTLPNTLVENTALPRQRARKRTKVLSLAKRILRFK

SEQ ID NO: 37447 - protein, 45 aa, Artificial Sequence
  Quasi-synthetic sequence derived from human genome
EGWTHLVRLLRLIILIRIFHLLHQKRQLEKLMRRLVSENKRRYTR

SEQ ID NO: 37448 - protein, 45 aa, Artificial Sequence
  Quasi-synthetic sequence derived from human genome
IVHARKKYRFHKTRSHVTHRTPKVKKSPKVRKKSYLSRLMLANRL

SEQ ID NO: 37449 - protein, 45 aa, Artificial Sequence
  Quasi-synthetic sequence derived from human genome
PLRRGRPKRRRKPQPHSGSVLALPLRSRKIRKQLRSVVSRMAALR

SEQ ID NO: 37450 - protein, 45 aa, Artificial Sequence
  Quasi-synthetic sequence derived from human genome
RAVAIVRLVLGFLWPLLTLTICYTFILLRTWSRRATRSTKTLKVV

SEQ ID NO: 37451 - protein, 45 aa, Artificial Sequence
  Quasi-synthetic sequence derived from human genome
RSLLSPGLLPHLLPALGFKNKTVLKKRCKDCYLVKRRGRWYVYCK

SEQ ID NO: 37452 - protein, 45 aa, Artificial Sequence
  Quasi-synthetic sequence derived from human genome
LRTLRAVRVLRPLKLVSGIPSLQIVLKSIMKAMVPLLQIGLLLFF

SEQ ID NO: 37453 - protein, 45 aa, Artificial Sequence
  Quasi-synthetic sequence derived from human genome
ILIILTGRHRGKRVVFLKQLASGLLLVTGPLVLNRVPLRRTHQKF

SEQ ID NO: 37454 - protein, 45 aa, Artificial Sequence
  Quasi-synthetic sequence derived from human genome
GMWICQVCRPKKKGRKLLHEKAAQIKRRYAKPIGRPKNKLKQRLL

SEQ ID NO: 37455 - protein, 45 aa, Artificial Sequence
  Quasi-synthetic sequence derived from human genome
ALFLLILLTGVLCHRFHGLWYMKMMWAWLQAKRKPRKAPSRNICY

SEQ ID NO: 37456 - protein, 45 aa, Artificial Sequence
  Quasi-synthetic sequence derived from human genome
KPFFRLQKFLRRTQFLLFFLTAAYLMTGSLLLLQRVRVALPQGPR

SEQ ID NO: 37457 - protein, 45 aa, Artificial Sequence
  Quasi-synthetic sequence derived from human genome
TYHTIFLLTILAALALLVLILLCLLIYYCRRRCLKPRQQHRKLQL

SEQ ID NO: 37458 - protein, 45 aa, Artificial Sequence
  Quasi-synthetic sequence derived from human genome
PRKLLSHGKKPFSQHVRKLRASITPGTILIILTGRHRGKRVVFLK

SEQ ID NO: 37459 - protein, 45 aa, Artificial Sequence
  Quasi-synthetic sequence derived from human genome
IPSRFKRSYNYKTIVKKILAKLKRARSKKLDNFQSEKKVFKKSFL

SEQ ID NO: 37460 - protein, 45 aa, Artificial Sequence
  Quasi-synthetic sequence derived from human genome
FLVLQRRRLPPVRPHGPGPARGRPPHPALPHRRRLHGRPVRRLFL

SEQ ID NO: 37461 - protein, 45 aa, Artificial Sequence
  Quasi-synthetic sequence derived from human genome
LGRHLGVVIGILVAVVLLLLLLLLLFLILRHRRQGKHWTSTQRKA

SEQ ID NO: 37462 - protein, 45 aa, Artificial Sequence
  Quasi-synthetic sequence derived from human genome
GFVMLAVSFLVAAICYFRRLHLYSGHKLKWWIGYLQRKFKRNLSV

SEQ ID NO: 37463 - protein, 45 aa, Artificial Sequence
  Quasi-synthetic sequence derived from human genome
VFLLAILGGMAFILLVLLCLLLYYCRRKCLKPRQHHRKLQLPAGL

SEQ ID NO: 37464 - protein, 45 aa, Artificial Sequence
  Quasi-synthetic sequence derived from human genome
RLRNAKIYVERAVKQKKIFTIQGCYPVIRCLLRRRGWVEKKMVHR

SEQ ID NO: 37465 - protein, 45 aa, Artificial Sequence
  Quasi-synthetic sequence derived from human genome
AAFRRLKAHNLCRQIRAACVIQSYWRMRQDRVRFLNLKKTIIKFQ

SEQ ID NO: 37466 - protein, 45 aa, Artificial Sequence
  Quasi-synthetic sequence derived from human genome
LLLPLLLLLPLLLLKLHLWPQLRWLPADLAFAVRALCCKRALRAR

SEQ ID NO: 37467 - protein, 45 aa, Artificial Sequence
  Quasi-synthetic sequence derived from human genome
LKLHRVLKVFLSRTAQRIPYMTGGRVMRMLAVILLVVFWFLIGWT

SEQ ID NO: 37468 - protein, 45 aa, Artificial Sequence
  Quasi-synthetic sequence derived from human genome
VLLSLLLILKAGRRWNKYFKSRRPLFTGGLIGGLFTYVLFWTFLY

SEQ ID NO: 37469 - protein, 45 aa, Artificial Sequence
  Quasi-synthetic sequence derived from human genome
FLKVIGKGSFGKVLLAKRKLDGKFYAVKVLQKKIVLNRKEQKHIM

SEQ ID NO: 37470 - protein, 45 aa, Artificial Sequence
  Quasi-synthetic sequence derived from human genome
LVKRARLVRVHAYIISYLKKEMPSVFGKENKKKQLILKLPVIFAK

SEQ ID NO: 37471 - protein, 45 aa, Artificial Sequence
  Quasi-synthetic sequence derived from human genome
KPKIPKGVSRKLDRLAYIAHPKLGKRARARIAKGLRLCRPKAKAK

SEQ ID NO: 37472 - protein, 45 aa, Artificial Sequence
  Quasi-synthetic sequence derived from human genome
LRAAKWLHFPQLALRRRLGQLSCMSRPALKLRSWPLTVLYYLLPF

SEQ ID NO: 37473 - protein, 45 aa, Artificial Sequence
  Quasi-synthetic sequence derived from human genome
RARGYLARQRYQQMRRSLVKFRSLVHAYVSRRRYLKLRAEWRCQV

SEQ ID NO: 37474 - protein, 45 aa, Artificial Sequence
  Quasi-synthetic sequence derived from human genome
KIQAWWRGTLVRRTLLHAALRAWIIQCWWRMTLSRVLEKKRQAAL

SEQ ID NO: 37475 - protein, 45 aa, Artificial Sequence
  Quasi-synthetic sequence derived from human genome
FVFIYVQLWLVLRYRHKRLSYQSVFLFLCLFWASLRTVLFSFYFK

SEQ ID NO: 37476 - protein, 45 aa, Artificial Sequence
  Quasi-synthetic sequence derived from human genome
PRSFRRHIRQHSALTRLRLRNVFRRFLRDFQPGRLSQQMVMVKYL

SEQ ID NO: 37477 - protein, 45 aa, Artificial Sequence
  Quasi-synthetic sequence derived from human genome
IFLVLLFSQYARNVKFPLPIYKSKKGWTAYKLQLFKMFPIILAIL

SEQ ID NO: 37478 - protein, 45 aa, Artificial Sequence
  Quasi-synthetic sequence derived from human genome
LAILKAVKIIQGCFYTKLERTRFLNVRASAIIIQRKWRAILPAKI

SEQ ID NO: 37479 - protein, 45 aa, Artificial Sequence
  Quasi-synthetic sequence derived from human genome
RIGRILRLVRAARGIRTLLFALMMSLPSLFNIGLLLFLIMFIYAI

SEQ ID NO: 37480 - protein, 45 aa, Artificial Sequence
  Quasi-synthetic sequence derived from human genome
LRIARFRFRAFHFLNRFPSVYLRCKMVVCRAYDPSSRCYRGCVLR

SEQ ID NO: 37481 - protein, 45 aa, Artificial Sequence
  Quasi-synthetic sequence derived from human genome
LVFLPLRLVWKEVILRKILILVLVQKDVSLTTQYFLQKARSRRHR

SEQ ID NO: 37482 - protein, 45 aa, Artificial Sequence
  Quasi-synthetic sequence derived from human genome
VRKCKPQMNYDKLSRALRYYYNKRILHKTKGKRFTYKFNFNKLVL

SEQ ID NO: 37483 - protein, 45 aa, Artificial Sequence
  Quasi-synthetic sequence derived from human genome
RRRFVQQKRAAITLQHYFRTWQTRKQFLLYRKAAVVLQNHYRAFL

SEQ ID NO: 37484 - protein, 45 aa, Artificial Sequence
  Quasi-synthetic sequence derived from human genome
LPVPGAKKSAKLYIPYIILTIIILTIVGFIWLLKVNGCRKYKLNK

SEQ ID NO: 37485 - protein, 45 aa, Artificial Sequence
  Quasi-synthetic sequence derived from human genome
CYLLIIRSLRQGLRVEKRLKTKAVRMIAIVLAIFLVCFVPYHVNR

SEQ ID NO: 37486 - protein, 45 aa, Artificial Sequence
  Quasi-synthetic sequence derived from human genome
IYPGHGMMFVRNDCKVFRFCKSKCHKNFKKKRNPRKVRWTKAFRK

SEQ ID NO: 37487 - protein, 45 aa, Artificial Sequence
  Quasi-synthetic sequence derived from human genome
KPKLSKFILISSLAILLMVSLLLLSLWKLWRVKKFLIPSVPDPKS

SEQ ID NO: 37488 - protein, 45 aa, Artificial Sequence
  Quasi-synthetic sequence derived from human genome
QLLLWKNVTLKRRSPWVLAFEIFIPLVLFFILLGLRQKKPTISVK

SEQ ID NO: 37489 - protein, 45 aa, Artificial Sequence
  Quasi-synthetic sequence derived from human genome
LIKKAVAVRKHLERNRKDKDAKFRLILIESRIHRLARYYKTKRVL

SEQ ID NO: 37490 - protein, 45 aa, Artificial Sequence
  Quasi-synthetic sequence derived from human genome
KRNLYYFSYPLFVGFALLRLVAFHLGLLFVWLCQRFSRALMAAKR

SEQ ID NO: 37491 - protein, 45 aa, Artificial Sequence
  Quasi-synthetic sequence derived from human genome
LRQRQMDRHAKIKRAITFIMVVAIVFVICFLPSVVVRIRIFWLLH

SEQ ID NO: 37492 - protein, 45 aa, Artificial Sequence
  Quasi-synthetic sequence derived from human genome
LCYLLIVGKMRAVALRAGWQQRRRSEKKITRLVLMVVVVFVLCWM

SEQ ID NO: 37493 - protein, 45 aa, Artificial Sequence
  Quasi-synthetic sequence derived from human genome
RFSCTQIWVKMYGYFAGLCRRLQKFWRVTVKGFFVKKKEKKIPSA

SEQ ID NO: 37494 - protein, 45 aa, Artificial Sequence
  Quasi-synthetic sequence derived from human genome
ICYTGIIKTLLRCPSKKKYKAIRLIFVIMAVFFIFWTPYNVAILL

SEQ ID NO: 37495 - protein, 45 aa, Artificial Sequence
  Quasi-synthetic sequence derived from human genome
LFTWDKWLKVYKSIYFLGHIFFLSLLFILPYIHKAMVPRKEKLKK

SEQ ID NO: 37496 - protein, 45 aa, Artificial Sequence
  Quasi-synthetic sequence derived from human genome
IIRIMRVLRIARVLKLLKMAVGMRALLDTVGNLGLLFMLLFFIFA

SEQ ID NO: 37497 - protein, 45 aa, Artificial Sequence
  Quasi-synthetic sequence derived from human genome
VLKNRSLKLQKMKYRPPKTKFFFTVIPQPIFLSPGITLTLPIVFR

SEQ ID NO: 37498 - protein, 45 aa, Artificial Sequence
  Quasi-synthetic sequence derived from human genome
KMRKEVKRIRVLVIRKLVRSVGRLKSKKGTEDALLKNQRRAQRLL

SEQ ID NO: 37499 - protein, 45 aa, Artificial Sequence
  Quasi-synthetic sequence derived from human genome
RRVVQIFRIMRILRILKLARHSTGLQSLGFTLRRSYNELGLLILF

SEQ ID NO: 37500 - protein, 45 aa, Artificial Sequence
  Quasi-synthetic sequence derived from human genome
KMVGPGFLSLGLMMLVCGLVWVPIIKKKQKHRQKSNFLRSLKSFF

SEQ ID NO: 37501 - protein, 45 aa, Artificial Sequence
  Quasi-synthetic sequence derived from human genome
HKGRLKHRGSSLHPFRKGLQEKDKVWLLREQKRKKKLRKLLKRLQ

SEQ ID NO: 37502 - protein, 45 aa, Artificial Sequence
  Quasi-synthetic sequence derived from human genome
LLVMLPTWWIVSSWLVWGVILFVYLVIRALRLWRTAKLQVTLKKY

SEQ ID NO: 37503 - protein, 45 aa, Artificial Sequence
  Quasi-synthetic sequence derived from human genome
VKKLPGVMLFKKKKTRKLKIALALSDLVIYTKAEKFKSFQHSRLY

SEQ ID NO: 37504 - protein, 45 aa, Artificial Sequence
  Quasi-synthetic sequence derived from human genome
LRYSSILTSNRVAKMGLILAIRSILLVIPFPFTLRRLKYCQKNLL

SEQ ID NO: 37505 - protein, 45 aa, Artificial Sequence
  Quasi-synthetic sequence derived from human genome
HLALILSSIFGLLLLVLFILFLTWCRVQKQKHLPLRVSTRRRGSL

SEQ ID NO: 37506 - protein, 45 aa, Artificial Sequence
  Quasi-synthetic sequence derived from human genome
LRYSFLKTASFFVRLGPMALAFKVRGLLDCKHSWKRLKDIRKIFP

SEQ ID NO: 37507 - protein, 45 aa, Artificial Sequence
  Quasi-synthetic sequence derived from human genome
WPALWELYRELGLFQGPALGLRNHLGRKLRRRKKKKAKRTTNWKI

SEQ ID NO: 37508 - protein, 45 aa, Artificial Sequence
  Quasi-synthetic sequence derived from human genome
KVSLFTAFFLATIMGVRFKRSKKIMPAGLVAGLSLMMILRLVLLL

SEQ ID NO: 37509 - protein, 45 aa, Artificial Sequence
  Quasi-synthetic sequence derived from human genome
FLYLKWRVKKVVLVLLLVTSVFLFLNIALINIHINASINGYRRNK

SEQ ID NO: 37510 - protein, 45 aa, Artificial Sequence
  Quasi-synthetic sequence derived from human genome
VKKNTLKKYKIACIVLLALLVIMSLGLGLGLGLRKLEKQGSCRKK

SEQ ID NO: 37511 - protein, 45 aa, Artificial Sequence
  Quasi-synthetic sequence derived from human genome
LWLRDTYKLWVPQPPPRTIKRTRRRLSRNRDPGRLILSTIRLRPR

SEQ ID NO: 37512 - protein, 45 aa, Artificial Sequence
  Quasi-synthetic sequence derived from human genome
CSLFTAALWGALAALFCLQYLGVRVLLRFQRKLSVLLLLLGRRRV

SEQ ID NO: 37513 - protein, 45 aa, Artificial Sequence
  Quasi-synthetic sequence derived from human genome
NFLKLKNAATLIQRHWRGHNCRKNYGLMRLGFLRLQALHRSRKLH

SEQ ID NO: 37514 - protein, 45 aa, Artificial Sequence
  Quasi-synthetic sequence derived from human genome
KHWMLHFPRITYPLVHLANWLCGLNLFWICKTCFRCLKRLKMSWF

SEQ ID NO: 37515 - protein, 45 aa, Artificial Sequence
  Quasi-synthetic sequence derived from human genome
FLKITSTRLLCSRLCQQLRSKRKFFGTVPISRLHRRVVITGIGLV

SEQ ID NO: 37516 - protein, 45 aa, Artificial Sequence
  Quasi-synthetic sequence derived from human genome
YWLGSKARRELKRLKEEARRKHAVAVIWAYWLGLKVRREYRKFFR

SEQ ID NO: 37517 - protein, 45 aa, Artificial Sequence
  Quasi-synthetic sequence derived from human genome
MRLTRKRLCSFLIALYCLFSLYAAYHVFFGRRRQAPAGSPRGLRK

SEQ ID NO: 37518 - protein, 45 aa, Artificial Sequence
  Quasi-synthetic sequence derived from human genome
YTIAVVVFHFLVPMIIVIFCYLRIWILVLQVRQRVKPDRKPKLKP

SEQ ID NO: 37519 - protein, 45 aa, Artificial Sequence
  Quasi-synthetic sequence derived from human genome
FWRNKKSNKVLPMRRVLRKRPSPAPRTIRIEWLKSKSTKAATKFM

SEQ ID NO: 37520 - protein, 45 aa, Artificial Sequence
  Quasi-synthetic sequence derived from human genome
RLAAIVAKQVLLGRKVVVVRCEGINISGNFYRNKLKYLAFLRKRM

SEQ ID NO: 37521 - protein, 45 aa, Artificial Sequence
  Quasi-synthetic sequence derived from human genome
KRYNRKRFFALPYVDHFLRLEREKRARIKARKENLERKKAKILLK

SEQ ID NO: 37522 - protein, 45 aa, Artificial Sequence
  Quasi-synthetic sequence derived from human genome
VLTVRPPLLPYIVNIKGQRIKKSVAYKTKKPPSLMYNVRKKKGKI

SEQ ID NO: 37523 - protein, 45 aa, Artificial Sequence
  Quasi-synthetic sequence derived from human genome
KKNRLFSKVLVTIKKVYMKERSFKGVEFGKNLGLKSSLIRKPRIV

SEQ ID NO: 37524 - protein, 45 aa, Artificial Sequence
  Quasi-synthetic sequence derived from human genome
IVHARKKYRFHKTRSHVTHRTTKVKKSPKVRKKSYLSRLMLANRL

SEQ ID NO: 37525 - protein, 45 aa, Artificial Sequence
  Quasi-synthetic sequence derived from human genome
SIAGPGLLIGLLYARLARAYRRSQRASFKRARRPGARALRLVLGI

SEQ ID NO: 37526 - protein, 45 aa, Artificial Sequence
  Quasi-synthetic sequence derived from human genome
IVGLALSDLIQKYFVSPTLFRVIRLARIGRVLRLIRGAKGIRTLL

SEQ ID NO: 37527 - protein, 45 aa, Artificial Sequence
  Quasi-synthetic sequence derived from human genome
PFRRKIYYLPRRYKFMSRIDKQISRFRRWLPKKPMRLDKETLPDL

SEQ ID NO: 37528 - protein, 45 aa, Artificial Sequence
  Quasi-synthetic sequence derived from human genome
KLLKGASKLLTARTGIEVPRQFLRKKVLLRGFSPSHLRAYARRMF

SEQ ID NO: 37529 - protein, 45 aa, Artificial Sequence
  Quasi-synthetic sequence derived from human genome
RRHFRMKLRNLFTKFIRKFGFELVKRLLPEEYHRVLVNIRKAEAR

SEQ ID NO: 37530 - protein, 45 aa, Artificial Sequence
  Quasi-synthetic sequence derived from human genome
LTGRLAQARGAAKKAGLLMALARLCFLLGRLCSRRLKLSQARVYF

SEQ ID NO: 37531 - protein, 45 aa, Artificial Sequence
  Quasi-synthetic sequence derived from human genome
IVALQLFYLSASINPILYNLISKKYRAAAFKLLLARKSRPRGFHR

SEQ ID NO: 37532 - protein, 45 aa, Artificial Sequence
  Quasi-synthetic sequence derived from human genome
RHPRVFAWVYRHQARHKAVVLRCHAVLLARAHKARALARLLRQTA

SEQ ID NO: 37533 - protein, 45 aa, Artificial Sequence
  Quasi-synthetic sequence derived from human genome
RKKRRRSRLVLYPETSRKYRPRVEHRSRAQRCLLLLVAIVGFQVL

SEQ ID NO: 37534 - protein, 45 aa, Artificial Sequence
  Quasi-synthetic sequence derived from human genome
VRTRGVGKVPRKKVNVKVFIIIAVFFICFVPFHFARIPYTLSQTR

SEQ ID NO: 37535 - protein, 45 aa, Artificial Sequence
  Quasi-synthetic sequence derived from human genome
YIYFIHSLCLLGRLLIYKQGRKLFPIKLKNKKGLVSLIDLLVLFT

SEQ ID NO: 37536 - protein, 45 aa, Artificial Sequence
  Quasi-synthetic sequence derived from human genome
PTRRELSLGRKKAPHRLCGRFSRISMKLPRIPLRRQKLPKVVVAH

SEQ ID NO: 37537 - protein, 45 aa, Artificial Sequence
  Quasi-synthetic sequence derived from human genome
SIRASAVGLLGTLVRRGRGGLRLGLRGPLRKLVLQSLVPLLLRLH

SEQ ID NO: 37538 - protein, 45 aa, Artificial Sequence
  Quasi-synthetic sequence derived from human genome
RGRLRRLLWIGFTLTAVALILWQCALLVFSFYTVSVSIKVHFRKL

SEQ ID NO: 37539 - protein, 45 aa, Artificial Sequence
  Quasi-synthetic sequence derived from human genome
FVVMRFSLAVLYQACCVALLLWLALLLSIQRRLPRERKIKYSKLL

SEQ ID NO: 37540 - protein, 45 aa, Artificial Sequence
  Quasi-synthetic sequence derived from human genome
ARWRRLRLQQLRRLRGLLRVLRGRPGAGSRRRGRMALCGQAAGAA

SEQ ID NO: 37541 - protein, 45 aa, Artificial Sequence
  Quasi-synthetic sequence derived from human genome
VTLWHLGYWLCYVNSTVNPICYALCNRTFRKTFKMLLLCRWKKKK

SEQ ID NO: 37542 - protein, 45 aa, Artificial Sequence
  Quasi-synthetic sequence derived from human genome
VRDRIRISRVCHRWKRLVDDRWLWRHVDLTLYTMRPKVMWHLLRR

SEQ ID NO: 37543 - protein, 45 aa, Artificial Sequence
  Quasi-synthetic sequence derived from human genome
YVKVFHKYSNSNRYKIRHTKKKTFKCMKCSKSFFMLSHLIQHKRI

SEQ ID NO: 37544 - protein, 45 aa, Artificial Sequence
  Quasi-synthetic sequence derived from human genome
RLLPRNTFSRKAFKLKKPSKYCSWKCAALSAIAAALLLAILLAYF

SEQ ID NO: 37545 - protein, 45 aa, Artificial Sequence
  Quasi-synthetic sequence derived from human genome
LPAKASRSKTRLKSQLLLQKYIAQRKWKKHFYVVTAANRLRKFPT

SEQ ID NO: 37546 - protein, 45 aa, Artificial Sequence
  Quasi-synthetic sequence derived from human genome
FWFVLKVVLIIIRLKKYEKRGELVTVLDKFLSHAKRQPRKPFIIY

SEQ ID NO: 37547 - protein, 45 aa, Artificial Sequence
  Quasi-synthetic sequence derived from human genome
YIPRKRGKNPMKAVGLAWYSLYTRTWLGYLFYRQQLRRARNRYPK

SEQ ID NO: 37548 - protein, 45 aa, Artificial Sequence
  Quasi-synthetic sequence derived from human genome
ALCTLRGRRCHCLPFPKRGMQRWMLPLRRGARLLPLASSKNPRAR

SEQ ID NO: 37549 - protein, 45 aa, Artificial Sequence
  Quasi-synthetic sequence derived from human genome
KCALVRHKFNRLPRVLILHLKRYSFNVALSLNNKIGQQVIIPRYL

SEQ ID NO: 37550 - protein, 45 aa, Artificial Sequence
  Quasi-synthetic sequence derived from human genome
RKVRAKETRKRALSRLKLKLNKDIVISVGIYNLVQKALKPPPIKL

SEQ ID NO: 37551 - protein, 45 aa, Artificial Sequence
  Quasi-synthetic sequence derived from human genome
LIIRLPILFAIGVNFLIFVRVICIVVSKLKANLMCKTDIKCRLAK

SEQ ID NO: 37552 - protein, 45 aa, Artificial Sequence
  Quasi-synthetic sequence derived from human genome
VCHGVLKRPARLPCSHIFCKKCILRWLARQKTCPCCRKEVKRKKV

SEQ ID NO: 37553 - protein, 45 aa, Artificial Sequence
  Quasi-synthetic sequence derived from human genome
NSKRRKSNPKPLVLSEARKQLMIYRLPQVLRLHLKRFRWSGRNHR

SEQ ID NO: 37554 - protein, 45 aa, Artificial Sequence
  Quasi-synthetic sequence derived from human genome
RRHYYLLRQFKIFSDFRMNKAFVTWKLNVKRIKTEKSRSFLYHHL

SEQ ID NO: 37555 - protein, 45 aa, Artificial Sequence
  Quasi-synthetic sequence derived from human genome
RLTFFFLIPLFIMIGCYLVIIHNLLHGRTSKLKPKVKEKSIRIII

SEQ ID NO: 37556 - protein, 45 aa, Artificial Sequence
  Quasi-synthetic sequence derived from human genome
KLKLNVLTIILLPVHLLITIYSALIFIPWYFLTNAKKKNAMAKRI

SEQ ID NO: 37557 - protein, 45 aa, Artificial Sequence
  Quasi-synthetic sequence derived from human genome
FGVRALHRLHQFQQLLWVLGLLVGLLLLLLGLGACYTWRRRRVCK

SEQ ID NO: 37558 - protein, 45 aa, Artificial Sequence
  Quasi-synthetic sequence derived from human genome
ILSIVGTVLSDIIQKYFFSPTLFRVIRLARIGRILRLIRGAKGIR

SEQ ID NO: 37559 - protein, 45 aa, Artificial Sequence
  Quasi-synthetic sequence derived from human genome
KAVRHFLLRKKQEKFTSGIIKIQALWRGYSWRKKNDCTKIKAIRL

SEQ ID NO: 37560 - protein, 45 aa, Artificial Sequence
  Quasi-synthetic sequence derived from human genome
LRARVSYRLLGVISLLHLVLSMGLQLYGFRQRQRARKEWRLHRGL

SEQ ID NO: 37561 - protein, 45 aa, Artificial Sequence
  Quasi-synthetic sequence derived from human genome
AVLRQLALLLWKNYTLQKRKVLVTVLELFLPLLFSGILIWLRLKI

SEQ ID NO: 37562 - protein, 45 aa, Artificial Sequence
  Quasi-synthetic sequence derived from human genome
KIIQFIRHWRQWNRIFRWKCHDIVKSKVFYWLVILIVALNTLSIA

SEQ ID NO: 37563 - protein, 45 aa, Artificial Sequence
  Quasi-synthetic sequence derived from human genome
LKLRSWPLTVLYYLLPFGALRPLSRVGWRPVSRVALYKSVPTRLL

SEQ ID NO: 37564 - protein, 45 aa, Artificial Sequence
  Quasi-synthetic sequence derived from human genome
VRICSKLKAVLQKQGIWSEIHFILTNPRSLKHLCRLKIRKCMGRL

SEQ ID NO: 37565 - protein, 45 aa, Artificial Sequence
  Quasi-synthetic sequence derived from human genome
KMKKKTFKGLIRIFRKGVIAVLAANRLKILGQSCASLFTWMESFK

SEQ ID NO: 37566 - protein, 45 aa, Artificial Sequence
  Quasi-synthetic sequence derived from human genome
KKKTTFFKRGKKLKCYLMPFGTGTSKCPGRFFALMEIKQLLVILL

SEQ ID NO: 37567 - protein, 45 aa, Artificial Sequence
  Quasi-synthetic sequence derived from human genome
VRGWLQKVKYHRLKGATLTLQRYCRGHLARRLAEHLRRIRAAVVL

SEQ ID NO: 37568 - protein, 45 aa, Artificial Sequence
  Quasi-synthetic sequence derived from human genome
IKTRYRIVKKTPASPLSAPPFPLSLPSWRARRLSLSRSLVLNRLR

SEQ ID NO: 37569 - protein, 45 aa, Artificial Sequence
  Quasi-synthetic sequence derived from human genome
VQRRKKRLRHRVPPRKPEPLVKLHRTALHWACLKGHSQLVNKLLV

SEQ ID NO: 37570 - protein, 45 aa, Artificial Sequence
  Quasi-synthetic sequence derived from human genome
MATPPFRLIRKMFSFKVSRWMGLACFRSLAASSPSIRQKKLMHKL

SEQ ID NO: 37571 - protein, 45 aa, Artificial Sequence
  Quasi-synthetic sequence derived from human genome
LARQHFKKRKIQDLAIRCVQKNIKKNKGVKDWPWWKLFTTVRPLI

SEQ ID NO: 37572 - protein, 45 aa, Artificial Sequence
  Quasi-synthetic sequence derived from human genome
RKWRAILPAKIAHEHFLMIKRHRAACLIQAHYRGYKGRQVFLRQK

SEQ ID NO: 37573 - protein, 45 aa, Artificial Sequence
  Quasi-synthetic sequence derived from human genome
RGKFKVIALTVLASVRIYYQYRRVKPVTREIVIRDPYALRPLRRL

SEQ ID NO: 37574 - protein, 45 aa, Artificial Sequence
  Quasi-synthetic sequence derived from human genome
KRYVAYFAQVKHLYNWNLPPRRILFIKHFIIYSIPRYVRDLKIQI

SEQ ID NO: 37575 - protein, 45 aa, Artificial Sequence
  Quasi-synthetic sequence derived from human genome
RQIYAVATLRFLKLRRERRALLCLLLVLGIAFIPIILEKIMYKVT

SEQ ID NO: 37576 - protein, 45 aa, Artificial Sequence
  Quasi-synthetic sequence derived from human genome
KILGVLRVLRLLRTLRPLRVISRAPGLKLVVETLISSLRPIGNIV

SEQ ID NO: 37577 - protein, 45 aa, Artificial Sequence
  Quasi-synthetic sequence derived from human genome
LFTPQHKMLRLRLPNLKMVRLRVSFSAVVFKAVSDICKILNIRRS

SEQ ID NO: 37578 - protein, 45 aa, Artificial Sequence
  Quasi-synthetic sequence derived from human genome
RSFALLLPVYALGYLGLSFSWVLLALALLAWCRRSRGLKALRLCR

SEQ ID NO: 37579 - protein, 45 aa, Artificial Sequence
  Quasi-synthetic sequence derived from human genome
IFWINFLIVIVCYTLITKELYRSYVRTRGVGKVPRKKVNVKVFII

SEQ ID NO: 37580 - protein, 45 aa, Artificial Sequence
  Quasi-synthetic sequence derived from human genome
LRGVRAVRPKVLMRLSKTKKHVSRAYGGSMCAKCVRDRIKRAFLI

SEQ ID NO: 37581 - protein, 45 aa, Artificial Sequence
  Quasi-synthetic sequence derived from human genome
RISITFFRLFRVMRLVKLLSRGEGIRTLLWTFIKSFQALPYVALL

SEQ ID NO: 37582 - protein, 45 aa, Artificial Sequence
  Quasi-synthetic sequence derived from human genome
RIARILAGSKKKICTKKPRFMSACAQLVIAFILICIQLGIIVALF

SEQ ID NO: 37583 - protein, 45 aa, Artificial Sequence
  Quasi-synthetic sequence derived from human genome
RVVHLQLLRRHTLRAAERNVRRKKVSFQLERIIKKQRLLEAQKRL

SEQ ID NO: 37584 - protein, 45 aa, Artificial Sequence
  Quasi-synthetic sequence derived from human genome
AVLGRALPTSRLDLACSLSWNVIRYSLQKLRLVRWLLKKVFQCRR

SEQ ID NO: 37585 - protein, 45 aa, Artificial Sequence
  Quasi-synthetic sequence derived from human genome
LLYFLFICPFVLLLLLLISLLCLYWKARKLSTLRSNTRKEKALWV

SEQ ID NO: 37586 - protein, 45 aa, Artificial Sequence
  Quasi-synthetic sequence derived from human genome
FRGHALPGTFFFIIGLWWCTKSILKYICKKQKRTCYLGSKTLFYR

SEQ ID NO: 37587 - protein, 45 aa, Artificial Sequence
  Quasi-synthetic sequence derived from human genome
ITLQPSSFRNLRLPKRLRVVYFLARTRLAQRLIMAGTVVWIGILV

SEQ ID NO: 37588 - protein, 45 aa, Artificial Sequence
  Quasi-synthetic sequence derived from human genome
LRVKRSVTRIKKRSRSVFYRLTILILVFAVSWMPLHLFHVVTDFN

SEQ ID NO: 37589 - protein, 45 aa, Artificial Sequence
  Quasi-synthetic sequence derived from human genome
LLLRKILLRKFCQMRKRRLREQAPLLPTPTVIDPSRFCAQPFRWF

SEQ ID NO: 37590 - protein, 45 aa, Artificial Sequence
  Quasi-synthetic sequence derived from human genome
FILGFLVPLTIICLCYLFIIIKVKSSGIRVGSSKRKKSEKKVTRM

SEQ ID NO: 37591 - protein, 45 aa, Artificial Sequence
  Quasi-synthetic sequence derived from human genome
KINLLFVAIFTGTVLSDIIQKYFFSPTLFRVIRLARIGRILRLIR

SEQ ID NO: 37592 - protein, 45 aa, Artificial Sequence
  Quasi-synthetic sequence derived from human genome
FHRLLLKWRGSIYKLLYREFIVFAVLYTAISLVYRLLLTGVQKRY

SEQ ID NO: 37593 - protein, 45 aa, Artificial Sequence
  Quasi-synthetic sequence derived from human genome
RLVRVFRIFKLSRHSKGLQILGQTLKASMRELGLLIFFLFIGVIL

SEQ ID NO: 37594 - protein, 45 aa, Artificial Sequence
  Quasi-synthetic sequence derived from human genome
RKAIQRRKWAVRIIRKFIKGFISRNKPLCPDNEEFIVFVRKNYIL

SEQ ID NO: 37595 - protein, 45 aa, Artificial Sequence
  Quasi-synthetic sequence derived from human genome
RPFSGRRLPVRAWADVRRESRLLQLLGRLPLFGLGRLVTRKSWLW

SEQ ID NO: 37596 - protein, 45 aa, Artificial Sequence
  Quasi-synthetic sequence derived from human genome
LALIQLTVIMGYLRIIRFLPLFKIIVPILIRIADVQIKKRLSLMY

SEQ ID NO: 37597 - protein, 45 aa, Artificial Sequence
  Quasi-synthetic sequence derived from human genome
KILGVLRVLRLLRTLRPLRVISRAPGLKLVVETLISSLKPIGNIV

SEQ ID NO: 37598 - protein, 45 aa, Artificial Sequence
  Quasi-synthetic sequence derived from human genome
LTIVFKHKHKDCVLYLLSKMWSTVSFPKISVPMRIYIKIKQWILR

SEQ ID NO: 37599 - protein, 45 aa, Artificial Sequence
  Quasi-synthetic sequence derived from human genome
RKFVFFNIPQIQYKNPWVQIMMFKNMTPSPFLRFYLGKPSGKRRR

SEQ ID NO: 37600 - protein, 45 aa, Artificial Sequence
  Quasi-synthetic sequence derived from human genome
RKRKISVCQQTWALLCKNFLKKWRMKRESLMEWLNSLLLLLCLYI

SEQ ID NO: 37601 - protein, 45 aa, Artificial Sequence
  Quasi-synthetic sequence derived from human genome
FLLLILLCMSLLLFQVIRLYQRRRWMIRALHLFPAPPAHWFYGHK

SEQ ID NO: 37602 - protein, 45 aa, Artificial Sequence
  Quasi-synthetic sequence derived from human genome
LGKQKKKYMPYNHQHKYFFLIGPPALLPLYFQWYIFYFVIQRKKW

SEQ ID NO: 37603 - protein, 45 aa, Artificial Sequence
  Quasi-synthetic sequence derived from human genome
YLLIVVKVRAAGVRVGCVRRRSERKVTRMVLVVVLVFAGCWLPFF

SEQ ID NO: 37604 - protein, 45 aa, Artificial Sequence
  Quasi-synthetic sequence derived from human genome
KSLVYGLVGAGVVLMLIILVALLMLVFRSKREVKRQKYRLSQLYK

SEQ ID NO: 37605 - protein, 45 aa, Artificial Sequence
  Quasi-synthetic sequence derived from human genome
CFLRRPGAPASWIWWRMLRQVLRRGLQSFCHRLGLCVSRHPVFFL

SEQ ID NO: 37606 - protein, 45 aa, Artificial Sequence
  Quasi-synthetic sequence derived from human genome
VYSWRHFHTLRMTIFCLVLPLLVMAICYTGIIKTLLRCPSKKKYK

SEQ ID NO: 37607 - protein, 45 aa, Artificial Sequence
  Quasi-synthetic sequence derived from human genome
VHRLRVQQAALRAARLRHQELFRLRGIKAQVALRLAELARRQRRR

SEQ ID NO: 37608 - protein, 45 aa, Artificial Sequence
  Quasi-synthetic sequence derived from human genome
RRNVNQTRLKRVLSGATLPDKLRDKLKLMKQRRKPPGFLALVKLL

SEQ ID NO: 37609 - protein, 45 aa, Artificial Sequence
  Quasi-synthetic sequence derived from human genome
RQRLRFGPRRALAALVRRGWRCGYLECSAKYNWHVLRLFRELLRC

SEQ ID NO: 37610 - protein, 45 aa, Artificial Sequence
  Quasi-synthetic sequence derived from human genome
VIAIAWLLYCHKTRLKKILKESRQRHLENFRIRAKHLAANWNRIR

SEQ ID NO: 37611 - protein, 45 aa, Artificial Sequence
  Quasi-synthetic sequence derived from human genome
AKALKAKKAVLKGVHSHKKKKIRTSPTFRRPKTLRLRRQPKYPRK

SEQ ID NO: 37612 - protein, 45 aa, Artificial Sequence
  Quasi-synthetic sequence derived from human genome
LGIEYTFPPLYYRRAHRRFVTKKALCIRVFQETQKLKKRRRALKA

SEQ ID NO: 37613 - protein, 45 aa, Artificial Sequence
  Quasi-synthetic sequence derived from human genome
KRRPKRREIPLKVLVKAVLFACMLMRKTMASRVRVTILFATETGK

SEQ ID NO: 37614 - protein, 45 aa, Artificial Sequence
  Quasi-synthetic sequence derived from human genome
TKLDRTAFKKTVNIPVLKVRKEIVSKLMRSLKRAALQRPGIRRVI

SEQ ID NO: 37615 - protein, 45 aa, Artificial Sequence
  Quasi-synthetic sequence derived from human genome
ILFKVITVFLNHSNLWFAAWLKVFYCLRIANFNHPLFFLMKRKII

SEQ ID NO: 37616 - protein, 45 aa, Artificial Sequence
  Quasi-synthetic sequence derived from human genome
RTYRCAHPLATLFKILASFYISLVIFYGLICMYTLWWMLRRSLKK

SEQ ID NO: 37617 - protein, 45 aa, Artificial Sequence
  Quasi-synthetic sequence derived from human genome
FMQLQQRLLREKEAKIRKALDRLRKKRHLLRRQRTRREFPVISVV

SEQ ID NO: 37618 - protein, 45 aa, Artificial Sequence
  Quasi-synthetic sequence derived from human genome
RLRVKAVTKIREFILQKIYSFRKPMTNYQIPQTALLKYRFFYQFL

SEQ ID NO: 37619 - protein, 45 aa, Artificial Sequence
  Quasi-synthetic sequence derived from human genome
KKFPHWLDKWMLTRKQFGLLSLFFAVLHAIYTLSYAMRRSYRYKL

SEQ ID NO: 37620 - protein, 45 aa, Artificial Sequence
  Quasi-synthetic sequence derived from human genome
LKIKLAVRMDKPQNMKHSGYLWAIGKNVWKRWKKRFFVLVQVSQY

SEQ ID NO: 37621 - protein, 45 aa, Artificial Sequence
  Quasi-synthetic sequence derived from human genome
RCRRLRAIYTIMRWFRRHKVRAHLAELQRRFQAARQPPLYGRDLV

SEQ ID NO: 37622 - protein, 45 aa, Artificial Sequence
  Quasi-synthetic sequence derived from human genome
FRLFRVMRLIKLLSRAEGVRTLLWTFIKSFQALPYVALLIVMLFF

SEQ ID NO: 37623 - protein, 45 aa, Artificial Sequence
  Quasi-synthetic sequence derived from human genome
KLWSFFIYLLRRQIRTVIQYQTVRYDILPLSPVSRNRLAQVKRKI

SEQ ID NO: 37624 - protein, 45 aa, Artificial Sequence
  Quasi-synthetic sequence derived from human genome
LCRKNQYQTRVIHDGARLFRIKCVTRIQAYWRGCVVRKWYRNLRK

SEQ ID NO: 37625 - protein, 45 aa, Artificial Sequence
  Quasi-synthetic sequence derived from human genome
RMEWIIPLIVVSALTFVCLILLIAVLVYWRGCNKIKSKGFPRRFR

SEQ ID NO: 37626 - protein, 45 aa, Artificial Sequence
  Quasi-synthetic sequence derived from human genome
VILLALGALLVLQLIRRRRREHGALWLPPGFTRRPRTQSAPHRRR

SEQ ID NO: 37627 - protein, 45 aa, Artificial Sequence
  Quasi-synthetic sequence derived from human genome
KIFFRAGQVAYLEKLRLDKLRQSCVMVQKHMRGWLQRKKFLRERR

SEQ ID NO: 37628 - protein, 45 aa, Artificial Sequence
  Quasi-synthetic sequence derived from human genome
KKFPHWLDKWMLTRKQFGLLSFFFAVLHAIYSLSYPMRRSYRYKL

SEQ ID NO: 37629 - protein, 45 aa, Artificial Sequence
  Quasi-synthetic sequence derived from human genome
YCSILFLTCISVHRCLGVLRPLRSLRWGRARYARRVAGAVWVLVL

SEQ ID NO: 37630 - protein, 45 aa, Artificial Sequence
  Quasi-synthetic sequence derived from human genome
MRRHCRTLRQRSRRPKMRPARRRGGRRQLLLRALDAVATCWEKLF

SEQ ID NO: 37631 - protein, 45 aa, Artificial Sequence
  Quasi-synthetic sequence derived from human genome
RRLQARRFRRSRRTGRLVVLIILTFAAFWLPYHVVNLAEAGRALA

SEQ ID NO: 37632 - protein, 45 aa, Artificial Sequence
  Quasi-synthetic sequence derived from human genome
QRWHWQKKVINKGLFFLGSLIAISSTYLLIHYMSPRSFLRLRRPW

SEQ ID NO: 37633 - protein, 45 aa, Artificial Sequence
  Quasi-synthetic sequence derived from human genome
ISVVKILRVLRVLRPLRAINRAKGLKHVVQCMFVAISTIGNIVLV

SEQ ID NO: 37634 - protein, 45 aa, Artificial Sequence
  Quasi-synthetic sequence derived from human genome
IISSILGSVWLAYKTPKLLRTARGRRIKKCATQLCRRCKTVCQFR

SEQ ID NO: 37635 - protein, 45 aa, Artificial Sequence
  Quasi-synthetic sequence derived from human genome
SIRAIRNFHTSPRFQAAPVPLLLMILKPVQKLFAIIVGRGIRKWW

SEQ ID NO: 37636 - protein, 45 aa, Artificial Sequence
  Quasi-synthetic sequence derived from human genome
IARKLCAHYQQSGKHNKKLKKSIKIIFIVVAAFLVSWLPFNTFKF

SEQ ID NO: 37637 - protein, 45 aa, Artificial Sequence
  Quasi-synthetic sequence derived from human genome
MFTRAQVRRILQRVPGKQRFGIYRFLPFFFVLGGTMEWIMIKVRV

SEQ ID NO: 37638 - protein, 45 aa, Artificial Sequence
  Quasi-synthetic sequence derived from human genome
RYLAIVHATRTLTQKRYLVKFICLSIWGLSLLLALPVLLFRRTVY

SEQ ID NO: 37639 - protein, 45 aa, Artificial Sequence
  Quasi-synthetic sequence derived from human genome
RRFRRWLNRYSYTVLSSWPERALISLKNRSRFLVRPNTRNRAFSW

SEQ ID NO: 37640 - protein, 45 aa, Artificial Sequence
  Quasi-synthetic sequence derived from human genome
RFLLRVRCWQYRQLSALHRAPRPTRPDKARRLGYKAKQGYVIYRI

SEQ ID NO: 37641 - protein, 45 aa, Artificial Sequence
  Quasi-synthetic sequence derived from human genome
KLSRALRYYYNKRILHKTKGKRFTYKFNFNKLVLVNYPFIDVGLA

SEQ ID NO: 37642 - protein, 45 aa, Artificial Sequence
  Quasi-synthetic sequence derived from human genome
QRLLFRIGYSLYTRTWLGYLFYRQQLRRARNRYPKGHSKTQPRLF

SEQ ID NO: 37643 - protein, 45 aa, Artificial Sequence
  Quasi-synthetic sequence derived from human genome
CILVGVLLLFVLLLVVRRRRREQRLKRLRDAKSLAEMLMSKNTRT

SEQ ID NO: 37644 - protein, 45 aa, Artificial Sequence
  Quasi-synthetic sequence derived from human genome
FKMNILGLLIPFTIFMFCYIKILHQLKRCQNHNKTKAIRLVLIVV

SEQ ID NO: 37645 - protein, 45 aa, Artificial Sequence
  Quasi-synthetic sequence derived from human genome
MQKSLRPIGLLRAQSLEWFYNNVKSRFKRFGSAKVLKNLYRKHRL

SEQ ID NO: 37646 - protein, 45 aa, Artificial Sequence
  Quasi-synthetic sequence derived from human genome
KFMVLLWKNFILKRRRCIALVVEMVLTFLFSAALLATRSVITINK

SEQ ID NO: 37647 - protein, 45 aa, Artificial Sequence
  Quasi-synthetic sequence derived from human genome
QVRKYLLRLDVRKDHVKFWRPQLLLLVGNPRGALPLLRLANQLKK

SEQ ID NO: 37648 - protein, 45 aa, Artificial Sequence
  Quasi-synthetic sequence derived from human genome
RKRRRQLRASVFALALPLSLGPCWALWVAVPKASATIRGPQRRLL

SEQ ID NO: 37649 - protein, 45 aa, Artificial Sequence
  Quasi-synthetic sequence derived from human genome
ARGAPRGSRRPGRTPKWRLPRISARAPYRLRRLRRHTYWPPRRPV

SEQ ID NO: 37650 - protein, 45 aa, Artificial Sequence
  Quasi-synthetic sequence derived from human genome
LPRLLQAAPAAAPRALLPQWPRRPGRRWPASPLGMKVFRRKALVL

SEQ ID NO: 37651 - protein, 45 aa, Artificial Sequence
  Quasi-synthetic sequence derived from human genome
RKFKSLLLHKRTAIQHAYRLLISQRRPAGISYRQFEGLMRFYKPR

SEQ ID NO: 37652 - protein, 45 aa, Artificial Sequence
  Quasi-synthetic sequence derived from human genome
CIMYKVPLIRKKSLRRTLSERGLLKDFLKKHNLNPARKYFPQWKA

SEQ ID NO: 37653 - protein, 45 aa, Artificial Sequence
  Quasi-synthetic sequence derived from human genome
YRLFDYRGRLSPVPVPRAVPVKRPRVTVPLVRRVKTNVPVKLFAR

SEQ ID NO: 37654 - protein, 45 aa, Artificial Sequence
  Quasi-synthetic sequence derived from human genome
MAFRALGVATQTAIAAAIALLALTALLLVAMICRRRRRRKKARGP

SEQ ID NO: 37655 - protein, 45 aa, Artificial Sequence
  Quasi-synthetic sequence derived from human genome
HGKRLFVIRPSRFYDRRFLKLLRFYIALTGIPVAIFITLVNVFIG

SEQ ID NO: 37656 - protein, 45 aa, Artificial Sequence
  Quasi-synthetic sequence derived from human genome
RTAKPAHIAKVKMKFRFLGKLMAKAIMDFRLVDLPLGLPFYKWML

SEQ ID NO: 37657 - protein, 45 aa, Artificial Sequence
  Quasi-synthetic sequence derived from human genome
VLRCIRLLRIFKITKYWTSLSNLVASLLNSIRSIASLLLLLFLFI

SEQ ID NO: 37658 - protein, 45 aa, Artificial Sequence
  Quasi-synthetic sequence derived from human genome
ERRLQTQVFKLGLAKSIHHARVLIRQRHIRVRKQVVNIPSFIVRL

SEQ ID NO: 37659 - protein, 45 aa, Artificial Sequence
  Quasi-synthetic sequence derived from human genome
ITRPLTYRAKRTPKRAGIMIGLAWLISFILWAPAILCWQYLVGKR

SEQ ID NO: 37660 - protein, 45 aa, Artificial Sequence
  Quasi-synthetic sequence derived from human genome
WRMLLRILPQSFGFIVPLLIMLFCYGFTLRTLFKAHMGQKHRAMR

SEQ ID NO: 37661 - protein, 45 aa, Artificial Sequence
  Quasi-synthetic sequence derived from human genome
HWRGYRQRKIYLEWLQYFKANLDAIIKIQAWARMWAARRQYLRRL

SEQ ID NO: 37662 - protein, 45 aa, Artificial Sequence
  Quasi-synthetic sequence derived from human genome
VLRPLDTVQRPKGYRKLLALGTWLLALLLTLPVMLAMRLVRRGPK

SEQ ID NO: 37663 - protein, 45 aa, Artificial Sequence
  Quasi-synthetic sequence derived from human genome
KLMRIKFQKILEERDALILIQWNIRAFMAVKNWPWMRLFFKIKPL

SEQ ID NO: 37664 - protein, 45 aa, Artificial Sequence
  Quasi-synthetic sequence derived from human genome
RANRIRSNSSAANLMAKKRVIRMLIVIVVLFFLCWMPIFSANAWR

SEQ ID NO: 37665 - protein, 45 aa, Artificial Sequence
  Quasi-synthetic sequence derived from human genome
WSWLRRRRARGIPPGPTPWPLVGNFGHVLLPPFLRRRSWLSSRTR

SEQ ID NO: 37666 - protein, 45 aa, Artificial Sequence
  Quasi-synthetic sequence derived from human genome
LYWKAQRYRLIREFHSRPALAPPFIVISHLRLLLRQLCRRPRSPQ

SEQ ID NO: 37667 - protein, 45 aa, Artificial Sequence
  Quasi-synthetic sequence derived from human genome
KRFLLARRSRRGLFAQIVLPALFVGLALVFSLIVPPFGHYPALRL

SEQ ID NO: 37668 - protein, 45 aa, Artificial Sequence
  Quasi-synthetic sequence derived from human genome
MLQWRRRHCCFAKMTWNAKRSLFRTHLIGVLSLVFLFAMFLFFNH

SEQ ID NO: 37669 - protein, 45 aa, Artificial Sequence
  Quasi-synthetic sequence derived from human genome
MGLKKKAFVWARNIGFKVNSKKMLGKYNTPVSYRMAKTLVFSKVK

SEQ ID NO: 37670 - protein, 45 aa, Artificial Sequence
  Quasi-synthetic sequence derived from human genome
IWLATSLSIFYLLKIVNFSRLIFHHLKRKAKSVVLVIVLGSLFFL

SEQ ID NO: 37671 - protein, 45 aa, Artificial Sequence
  Quasi-synthetic sequence derived from human genome
RFPSRYWLGAYQLQRVVLAFMVPLGVITTSYLLLLAFLQRRQRRR

SEQ ID NO: 37672 - protein, 45 aa, Artificial Sequence
  Quasi-synthetic sequence derived from human genome
VLPKPRMRGLLARRLRNHMAVAFVLSLGVAALYKFRVADQRKKAY

SEQ ID NO: 37673 - protein, 45 aa, Artificial Sequence
  Quasi-synthetic sequence derived from human genome
QLKAKRKVVKMMIIVVMTFAICWLPYHIYFILTAIYQQLNRWKYI

SEQ ID NO: 37674 - protein, 45 aa, Artificial Sequence
  Quasi-synthetic sequence derived from human genome
KLVKPKKKRRKKSVYTVGLRGLINLGNTCFMNCIVQALTHIPLLK

SEQ ID NO: 37675 - protein, 45 aa, Artificial Sequence
  Quasi-synthetic sequence derived from human genome
YLNLKKTAIKIQSVYRGIRVRRHIQHMHRAATFIKAMFKMHQSRI

SEQ ID NO: 37676 - protein, 45 aa, Artificial Sequence
  Quasi-synthetic sequence derived from human genome
FLLKHVRRNKLGYVSVKLLTSFKKVKHLTRDWRTTAHALKYSVVL

SEQ ID NO: 37677 - protein, 45 aa, Artificial Sequence
  Quasi-synthetic sequence derived from human genome
STLHLVLRLRGGAKKRKKKSYTTPKKNKHKRKKVKLAVLKYYKVD

SEQ ID NO: 37678 - protein, 45 aa, Artificial Sequence
  Quasi-synthetic sequence derived from human genome
FFRLFRVMRLVKLLSRGEGIRTLLWTFIKSFQALPYVALLIVMLF

SEQ ID NO: 37679 - protein, 45 aa, Artificial Sequence
  Quasi-synthetic sequence derived from human genome
RRRKSLWLALSASWLLLVLLGGFSLLRLALPPRPRPGASQGWPRW

SEQ ID NO: 37680 - protein, 45 aa, Artificial Sequence
  Quasi-synthetic sequence derived from human genome
CFCQKGFKIQSKLLKHKQIHTRNKAFRALLLKKRRTESRPLPNKL

SEQ ID NO: 37681 - protein, 45 aa, Artificial Sequence
  Quasi-synthetic sequence derived from human genome
VFHGAIMSVFPVVMYFWKRFCFWKATRSYLQYRGKKFKDRKSPPK

SEQ ID NO: 37682 - protein, 45 aa, Artificial Sequence
  Quasi-synthetic sequence derived from human genome
AVIKIQSSYRRWMIRKRMREMHRAATFIQSTFRMHRLHMRYQALK

SEQ ID NO: 37683 - protein, 45 aa, Artificial Sequence
  Quasi-synthetic sequence derived from human genome
FYCLRIANFNHPLFFLMKRKIIVLMPWLLRLSVLVSLSFSFPLSR

SEQ ID NO: 37684 - protein, 45 aa, Artificial Sequence
  Quasi-synthetic sequence derived from human genome
WIRCNTTIRKSGFGGITMLFTGYFVLCCSWSFRRLKKLCRPLPWK

SEQ ID NO: 37685 - protein, 45 aa, Artificial Sequence
  Quasi-synthetic sequence derived from human genome
GLAAGTVASIILALVLLVVLLVVCGPLAYKKLVKKFRQKKQRQWI

SEQ ID NO: 37686 - protein, 45 aa, Artificial Sequence
  Quasi-synthetic sequence derived from human genome
KRVIGKAGRNRWLGKRPNSGRWHRKGGWAGRKIRPLPPMKSYVKL

SEQ ID NO: 37687 - protein, 45 aa, Artificial Sequence
  Quasi-synthetic sequence derived from human genome
RKTIGGVALWRQQICAIARVRLLKLKHERKALLALLLILMAGFCP

SEQ ID NO: 37688 - protein, 45 aa, Artificial Sequence
  Quasi-synthetic sequence derived from human genome
RCLAVTRPFLAPRLRSPALARRLLLAVWLAALLLAVPAAVYRHLW

SEQ ID NO: 37689 - protein, 45 aa, Artificial Sequence
  Quasi-synthetic sequence derived from human genome
LIRKPRIVSRGRRPRSQQYSVLFKQLGVNTVRKCYKCNICGKIFL

SEQ ID NO: 37690 - protein, 45 aa, Artificial Sequence
  Quasi-synthetic sequence derived from human genome
RRQEQRATVRALWFWAFSLQAKVWATWLAFVLERRRKKARLQWAL

SEQ ID NO: 37691 - protein, 45 aa, Artificial Sequence
  Quasi-synthetic sequence derived from human genome
MSRLRHPRTRWKNWWVRGILTLAMIAFFFIIIYLGPMVLMIIVMC

SEQ ID NO: 37692 - protein, 45 aa, Artificial Sequence
  Quasi-synthetic sequence derived from human genome
LQPSSFRNLRLPKRLRVVYFLARTRLAQRLIMAGTVVWIGILVYT

SEQ ID NO: 37693 - protein, 45 aa, Artificial Sequence
  Quasi-synthetic sequence derived from human genome
PQKTKRKRKARTVLKSTSKLMTQMRMGKKKRAMKGKKPSFMVIRF

SEQ ID NO: 37694 - protein, 45 aa, Artificial Sequence
  Quasi-synthetic sequence derived from human genome
VRSLLRLLAAAAACGAFAFLGYCIYLNRKRRGDPAFKRRLRDKRR

SEQ ID NO: 37695 - protein, 45 aa, Artificial Sequence
  Quasi-synthetic sequence derived from human genome
KKSKVHYHVAVIINYLGHCISLVALLVAFVLFLRLRSIRCLRNII

SEQ ID NO: 37696 - protein, 45 aa, Artificial Sequence
  Quasi-synthetic sequence derived from human genome
RLKLLLMPLKHQPDFIYLRHVPLRRVHLFTFLQVLCLALLWILKS

SEQ ID NO: 37697 - protein, 45 aa, Artificial Sequence
  Quasi-synthetic sequence derived from human genome
RKITSRPFTRFRTAVRVVIAILRLRFLVKKWQEVDRKGALAQGKA

SEQ ID NO: 37698 - protein, 45 aa, Artificial Sequence
  Quasi-synthetic sequence derived from human genome
KLSKIRVVRKSIARVLTVINQTQKENLRKFYKGKKYKPLDLRPKK

SEQ ID NO: 37699 - protein, 45 aa, Artificial Sequence
  Quasi-synthetic sequence derived from human genome
LPLHRPSWATWLDFLILKVAVGTRLHRVPVKIKRMCVNGLCRARK

SEQ ID NO: 37700 - protein, 45 aa, Artificial Sequence
  Quasi-synthetic sequence derived from human genome
LFSLMDMKPPISRAKMILITKAAIKAIKLYKHVVQIVEKFIKKCK

SEQ ID NO: 37701 - protein, 45 aa, Artificial Sequence
  Quasi-synthetic sequence derived from human genome
LCARVRKLRSAGRCGKFHQVRRVMTILFLTMVISYFGCMKAAPMK

SEQ ID NO: 37702 - protein, 45 aa, Artificial Sequence
  Quasi-synthetic sequence derived from human genome
VARLWGIRKNKPNMNYDKLSRALRYYYVKNIIKKVNGQKFVYKFV

SEQ ID NO: 37703 - protein, 45 aa, Artificial Sequence
  Quasi-synthetic sequence derived from human genome
RLLYPRQEVVQATLVVLALAMVPILLLGTPLHLLHRHRRRLRRRP

SEQ ID NO: 37704 - protein, 45 aa, Artificial Sequence
  Quasi-synthetic sequence derived from human genome
HQRPKRYFTIVIISSSLLLGLIVLLLISYVMWKAGFFKRQYKSIL

SEQ ID NO: 37705 - protein, 45 aa, Artificial Sequence
  Quasi-synthetic sequence derived from human genome
IPVFAFLGAMVVLAFFVVQINKAKSRPKRRKPRVKRPQLMQQVHP

SEQ ID NO: 37706 - protein, 45 aa, Artificial Sequence
  Quasi-synthetic sequence derived from human genome
IRHGRTAYLQLYATLLLLLIVSVLACNFSVILNLIRMHRRSRRSR

SEQ ID NO: 37707 - protein, 45 aa, Artificial Sequence
  Quasi-synthetic sequence derived from human genome
KVKKIWQKQFRWPKNRLQILKFCKAREDLLKIQKERDFHRMHHKR

SEQ ID NO: 37708 - protein, 45 aa, Artificial Sequence
  Quasi-synthetic sequence derived from human genome
RYLAVVHPIKSAKWRRPRTAKMITMAVWGVSLLVILPIMIYAGLR

SEQ ID NO: 37709 - protein, 45 aa, Artificial Sequence
  Quasi-synthetic sequence derived from human genome
IIKMTRILTAFKVVRTLKTGFGFTNVTAHQKWKFSRPGIRLLSVK

SEQ ID NO: 37710 - protein, 45 aa, Artificial Sequence
  Quasi-synthetic sequence derived from human genome
KGPLCSPITLGLLVAGVLVLLVSLGVAIHLCCRRRRARLRFMKQF

SEQ ID NO: 37711 - protein, 45 aa, Artificial Sequence
  Quasi-synthetic sequence derived from human genome
FRAARLIKLLRQGYTIRILLWTFVQSFKALPYVCLLIAMLFFIYA

SEQ ID NO: 37712 - protein, 45 aa, Artificial Sequence
  Quasi-synthetic sequence derived from human genome
RRKIFPGLILSDIKPAKRMKFKTVCYLLVQLMHCRKMFKAEIPFS

SEQ ID NO: 37713 - protein, 45 aa, Artificial Sequence
  Quasi-synthetic sequence derived from human genome
FWRRLLGLLPGRPGLAALLGRLSDRLGRNRDRQRRRSPWLLLAPL

SEQ ID NO: 37714 - protein, 45 aa, Artificial Sequence
  Quasi-synthetic sequence derived from human genome
PAKKKRKKGLRIKGKRRRKKLILAKKFSKDLGSGRPVADAPALLA

SEQ ID NO: 37715 - protein, 45 aa, Artificial Sequence
  Quasi-synthetic sequence derived from human genome
RRTAVIVQQKLRSSLLTKKQDQAARKIMRFLRRCRHRVKELKKAK

SEQ ID NO: 37716 - protein, 45 aa, Artificial Sequence
  Quasi-synthetic sequence derived from human genome
FFNISGILLWYPVPCTRLPIRMAKALGKRTAKYRWFAVLYLLVCF

SEQ ID NO: 37717 - protein, 45 aa, Artificial Sequence
  Quasi-synthetic sequence derived from human genome
SRLGRRLGRRRRPRSPPEPLRVRARLRLRSPSGAFAALGALVVLV

SEQ ID NO: 37718 - protein, 45 aa, Artificial Sequence
  Quasi-synthetic sequence derived from human genome
AVRIKTSIFSLFRAPKLRMRVFGLCFVRFAITVPFYGLILNLQHL

SEQ ID NO: 37719 - protein, 45 aa, Artificial Sequence
  Quasi-synthetic sequence derived from human genome
LILCLLVVRFDPASPSSLHFLYKLAQLFRWIRKAAFSRLYQLRIR

SEQ ID NO: 37720 - protein, 45 aa, Artificial Sequence
  Quasi-synthetic sequence derived from human genome
LRALLVVVNALLRKRRYHAALAVLKGFRNGAVYGAKIRAPHALVM

SEQ ID NO: 37721 - protein, 45 aa, Artificial Sequence
  Quasi-synthetic sequence derived from human genome
IVLAKKMLRKALKLLNRIFPYNLISLFLHIHVEKNRHFHYVNRQA

SEQ ID NO: 37722 - protein, 45 aa, Artificial Sequence
  Quasi-synthetic sequence derived from human genome
LSGRPHLPGKKKIRWDPVRRRFIQSCPIIRIPNRFLRGHRPPPAR

SEQ ID NO: 37723 - protein, 45 aa, Artificial Sequence
  Quasi-synthetic sequence derived from human genome
GLSLIIGLRKTFWFFFQRHKLKGTSFLLGGVVIVLLRWPLLGMFL

SEQ ID NO: 37724 - protein, 45 aa, Artificial Sequence
  Quasi-synthetic sequence derived from human genome
RTHHTGLLSVLAMFFLLVLILSSVFLFRLFKRRQGRIFPEGKMWK

SEQ ID NO: 37725 - protein, 45 aa, Artificial Sequence
  Quasi-synthetic sequence derived from human genome
KRARRPGARALRLVLGIVLLFWACFLPFWLWQLLAQYHQAPLAPR

SEQ ID NO: 37726 - protein, 45 aa, Artificial Sequence
  Quasi-synthetic sequence derived from human genome
LLLLLLFYVVRYCWLRRQAALQRRLSAMEKGKLHKPGKDASKRGR

SEQ ID NO: 37727 - protein, 45 aa, Artificial Sequence
  Quasi-synthetic sequence derived from human genome
GRRKVGDMWILFFLWLWTSFNTAFLALQSLRFGFGFRRGRSFLLR

SEQ ID NO: 37728 - protein, 45 aa, Artificial Sequence
  Quasi-synthetic sequence derived from human genome
LRSLTDAVPLSVLILGLLIMFITIVFCAAGIVVLVLHRRRRYKKK

SEQ ID NO: 37729 - protein, 45 aa, Artificial Sequence
  Quasi-synthetic sequence derived from human genome
RGHRKRSRRVLYPRVVRRQLPVEEPNPAKRLLFLLLTIVFCQILM

SEQ ID NO: 37730 - protein, 45 aa, Artificial Sequence
  Quasi-synthetic sequence derived from human genome
IRKPGRKYERIFTLLKHVQGSLQTRLIFLQNVIKEASRFKKRMLI

SEQ ID NO: 37731 - protein, 45 aa, Artificial Sequence
  Quasi-synthetic sequence derived from human genome
LVRLLRLIILIRIFHLLHQKRQLEKLMRRLVSENKRRYTRDGFDL

SEQ ID NO: 37732 - protein, 45 aa, Artificial Sequence
  Quasi-synthetic sequence derived from human genome
RGACRIYNSTYLGRAFFGLKVALIFPVLVLLTVFIFVVRKKSHGK

SEQ ID NO: 37733 - protein, 45 aa, Artificial Sequence
  Quasi-synthetic sequence derived from human genome
LLMVLRCLRPLRIFKLVPQMRKVVRELFSGFKEIFLVSILLLTLM

SEQ ID NO: 37734 - protein, 45 aa, Artificial Sequence
  Quasi-synthetic sequence derived from human genome
LATLIQKIYRGWKCRTHFLLMKKSQIVIAAWYRRYAQQKRYQQTK

SEQ ID NO: 37735 - protein, 45 aa, Artificial Sequence
  Quasi-synthetic sequence derived from human genome
LLVLLLVALSALFLGRWLVVRLATKWCQRKLQAELKIGSFRFFWI

SEQ ID NO: 37736 - protein, 45 aa, Artificial Sequence
  Quasi-synthetic sequence derived from human genome
KSPEEMRKLFIQRAKKIDKISRIGFPMAFLIFNMFYWIIYKIVRR

SEQ ID NO: 37737 - protein, 45 aa, Artificial Sequence
  Quasi-synthetic sequence derived from human genome
KAIDIYILVCLFFVFLSLLEYVYINYLFYSRGPRRQPRRHRRPRR

SEQ ID NO: 37738 - protein, 45 aa, Artificial Sequence
  Quasi-synthetic sequence derived from human genome
IEWKTLQKKKQQKIKEKLRIRTKAAVKIQAWWRGTLVRRTLLHAA

SEQ ID NO: 37739 - protein, 45 aa, Artificial Sequence
  Quasi-synthetic sequence derived from human genome
WWRSFLGRKQYQLTVQVAYYTMMMNLYNAMAVRIQRRWRGYRVRK

SEQ ID NO: 37740 - protein, 45 aa, Artificial Sequence
  Quasi-synthetic sequence derived from human genome
SQLRGARVITPEDLLFLMRKDKKKLRRLLKYMFIRDYKSKIVKGI

SEQ ID NO: 37741 - protein, 45 aa, Artificial Sequence
  Quasi-synthetic sequence derived from human genome
KVKKPKKVYCYVSPKQFSVKEFYLKIIPWRLYTFRVCPGTKFSYL

SEQ ID NO: 37742 - protein, 45 aa, Artificial Sequence
  Quasi-synthetic sequence derived from human genome
KRYPGWVILVGTGALGLLLLFLLGYGWAAACAGARKKRRSPPRKR

SEQ ID NO: 37743 - protein, 45 aa, Artificial Sequence
  Quasi-synthetic sequence derived from human genome
KIRRKNCPACRLRKCCQAGMVLGGRKFKKFNKVRVVRALDAVALP

SEQ ID NO: 37744 - protein, 45 aa, Artificial Sequence
  Quasi-synthetic sequence derived from human genome
LQARLRGFLVRQKFAEHSHFLRTWLPAVIKIQAHWRGYRQRKIYL

SEQ ID NO: 37745 - protein, 45 aa, Artificial Sequence
  Quasi-synthetic sequence derived from human genome
RYLALVKTMSMGRMRGVRWAKLYSLVIWGCTLLLSSPMLVFRTMK

SEQ ID NO: 37746 - protein, 45 aa, Artificial Sequence
  Quasi-synthetic sequence derived from human genome
RMARKAGNFYVPAEPKLAFVIRIRGINGVSPKVRKVLQLLRLRQI

SEQ ID NO: 37747 - protein, 45 aa, Artificial Sequence
  Quasi-synthetic sequence derived from human genome
HLLTLFHRLCKLLFFRIRPIFVFDGDAPLLKKQTLVKRRQRKDLA

SEQ ID NO: 37748 - protein, 45 aa, Artificial Sequence
  Quasi-synthetic sequence derived from human genome
TKIQLAVSHMGVLVFQGTTKINTFNWSKVRKLSFKRKRFLIKLHP

SEQ ID NO: 37749 - protein, 45 aa, Artificial Sequence
  Quasi-synthetic sequence derived from human genome
LTRKGIVRVVFFPFFFRWWLQVTSKVIFFWLLVLYLLQVAAIVLF

SEQ ID NO: 37750 - protein, 45 aa, Artificial Sequence
  Quasi-synthetic sequence derived from human genome
QGKPRGQPNTALLSLVLMAGTFFIAFFLRKFKNSRFFPGRIRRVI

SEQ ID NO: 37751 - protein, 45 aa, Artificial Sequence
  Quasi-synthetic sequence derived from human genome
VVRSSVHARWIVGKVIGTKMQKTAKVRVTRLVLDPYLLKYFNKRK

SEQ ID NO: 37752 - protein, 45 aa, Artificial Sequence
  Quasi-synthetic sequence derived from human genome
PLRKVHLFTIIQMSCLGLLWIIKVSRAAIVFPMMVLALVFVRKLM

SEQ ID NO: 37753 - protein, 45 aa, Artificial Sequence
  Quasi-synthetic sequence derived from human genome
MRPAANVARKFASIARNQVRKKRQMAARERKVTRTIFAILLAFIL

SEQ ID NO: 37754 - protein, 45 aa, Artificial Sequence
  Quasi-synthetic sequence derived from human genome
WKKGLPWRAKMSRGNSKQRKLKINPKRYKGNFLQSCVQLRASRLR

SEQ ID NO: 37755 - protein, 45 aa, Artificial Sequence
  Quasi-synthetic sequence derived from human genome
MPLKSSVGSRRGFFTKLPPAERRYFKRVVLAARTKRGHLVLKSFK

SEQ ID NO: 37756 - protein, 45 aa, Artificial Sequence
  Quasi-synthetic sequence derived from human genome
WRMVLRILPHTFGFIVPLFVMLFCYGFTLRTLFKAHMGQKHRAMR

SEQ ID NO: 37757 - protein, 45 aa, Artificial Sequence
  Quasi-synthetic sequence derived from human genome
REFKRAFLRLLRCQCRRRRRRRPLWRVYGHHWRASTSGLRQDCAP

SEQ ID NO: 37758 - protein, 45 aa, Artificial Sequence
  Quasi-synthetic sequence derived from human genome
VFKAKVKRRPEMSRGLLAVRGAFVGASLLFLLVNVLCAVLSHRRR

SEQ ID NO: 37759 - protein, 45 aa, Artificial Sequence
  Quasi-synthetic sequence derived from human genome
FIVVSFAGRLVVYKIVYMFLFLLCLTLFQVYYSLWRKLLKAFWWL

SEQ ID NO: 37760 - protein, 45 aa, Artificial Sequence
  Quasi-synthetic sequence derived from human genome
RYYRLAPMRLYTLSKRHFVLVFVVFFICFGLTIFVGIRGPKVIQT

SEQ ID NO: 37761 - protein, 45 aa, Artificial Sequence
  Quasi-synthetic sequence derived from human genome
KSKIKSKYASYLSFIKILLKRGGVKVSTKNLIKLFQIIEQFCPWF

SEQ ID NO: 37762 - protein, 45 aa, Artificial Sequence
  Quasi-synthetic sequence derived from human genome
MKWLLLLGLVALSECIMYKVPLIRKKSLRRTLSERGLLKDFLKKH

SEQ ID NO: 37763 - protein, 45 aa, Artificial Sequence
  Quasi-synthetic sequence derived from human genome
PLLLPKGVVLKLKPVATRFPRKAWRQKRSSVLKPLLIQPSPSLQP

SEQ ID NO: 37764 - protein, 45 aa, Artificial Sequence
  Quasi-synthetic sequence derived from human genome
THSPLTSIISAVVGILLVVVLGVVFGILIKRRQQKIRKYTMRRLL

SEQ ID NO: 37765 - protein, 45 aa, Artificial Sequence
  Quasi-synthetic sequence derived from human genome
KKQRLSKKLRRKLQMWLWSQTFCPVLYAWNDLGSRFWPRYVKVGS

SEQ ID NO: 37766 - protein, 45 aa, Artificial Sequence
  Quasi-synthetic sequence derived from human genome
KLLAKRRRMVLEFYVQQEWAAVRLQSWVRMWCVRQRYCRLLNAVR

SEQ ID NO: 37767 - protein, 45 aa, Artificial Sequence
  Quasi-synthetic sequence derived from human genome
FKNLFYRTYMLFKNASGKRRFLLCLLLFTVITYFFVVIGIAPIFI

SEQ ID NO: 37768 - protein, 45 aa, Artificial Sequence
  Quasi-synthetic sequence derived from human genome
RYLQRLLLVHGRWSYFRMCKFLCYFFYKNFAFTLVHFWFGFFCGF

SEQ ID NO: 37769 - protein, 45 aa, Artificial Sequence
  Quasi-synthetic sequence derived from human genome
LAKRQRLPSVENRPKIAAFLPARQLWKWFGKPTQRRGMKGKARKL

SEQ ID NO: 37770 - protein, 45 aa, Artificial Sequence
  Quasi-synthetic sequence derived from human genome
MFAKTWRVHAIFKNVKMKKKIIKDQKLLVIVGGMLLIDLCILICW

SEQ ID NO: 37771 - protein, 45 aa, Artificial Sequence
  Quasi-synthetic sequence derived from human genome
LRKLNDLVKRARLVRVHAYIISYLKKEMPSVFGKENKKKQLILKL

SEQ ID NO: 37772 - protein, 45 aa, Artificial Sequence
  Quasi-synthetic sequence derived from human genome
WFRLSFVYNHYLFFACILVVLLAIFLYLLRLRRIHHRQTRASAPL

SEQ ID NO: 37773 - protein, 45 aa, Artificial Sequence
  Quasi-synthetic sequence derived from human genome
LSVERYLAICRPLRARVLVTRRRVRALIAVLWAVALLSAGPFLFL

SEQ ID NO: 37774 - protein, 45 aa, Artificial Sequence
  Quasi-synthetic sequence derived from human genome
IAKLILPNKQKNAAKSNLLQCYAFRALRFLFSMERNRPLFKRLFP

SEQ ID NO: 37775 - protein, 45 aa, Artificial Sequence
  Quasi-synthetic sequence derived from human genome
LARWKTHHLQCVRKRLLHRQSTQLLAQRLSRTCFRQWRQQLAARR

SEQ ID NO: 37776 - protein, 45 aa, Artificial Sequence
  Quasi-synthetic sequence derived from human genome
KKKMSKLSRSARAGVIFPVGRLMRYLKKGTFKYRISVGAPVYMAA

SEQ ID NO: 37777 - protein, 45 aa, Artificial Sequence
  Quasi-synthetic sequence derived from human genome
VKIRSRKLGIFRRCWLVFKKASSKGPRRLEKFPDEKAAYFRNFHK

SEQ ID NO: 37778 - protein, 45 aa, Artificial Sequence
  Quasi-synthetic sequence derived from human genome
PTPLLPLLLRLLLSCLLLPAARLARQYLLPLLRRLARRLGSQDMR

SEQ ID NO: 37779 - protein, 45 aa, Artificial Sequence
  Quasi-synthetic sequence derived from human genome
LPLVAMAAGGRWVRQQGPRVRRGISRLWLRVLLRLSPMAFRALQG

SEQ ID NO: 37780 - protein, 45 aa, Artificial Sequence
  Quasi-synthetic sequence derived from human genome
TFRCILLRWARLLGFATVYGTVTLKLHRVLKVFLSRTAQRIPYMT

SEQ ID NO: 37781 - protein, 45 aa, Artificial Sequence
  Quasi-synthetic sequence derived from human genome
MFRKPYVRRRPSKRRGARAFRCIKPAPVIHPASVIFTVPATTVKI

SEQ ID NO: 37782 - protein, 45 aa, Artificial Sequence
  Quasi-synthetic sequence derived from human genome
TIQLGRKLITKYNRRELTDKLLIFLALALFLATVLYIVKKRLFPF

SEQ ID NO: 37783 - protein, 45 aa, Artificial Sequence
  Quasi-synthetic sequence derived from human genome
IIVYKLRRKSNFRLRGYSTGKTTAILFTITSIFATLWAPRIIMIL

SEQ ID NO: 37784 - protein, 45 aa, Artificial Sequence
  Quasi-synthetic sequence derived from human genome
VIQRCYRKYKQLTWIALKFALYKKMTQAAILIQSKFRSYYEQKRF

SEQ ID NO: 37785 - protein, 45 aa, Artificial Sequence
  Quasi-synthetic sequence derived from human genome
VAAEIKQIRARRKTARMLMIVLLVFAICYLPISILNVLKRVFGMF

SEQ ID NO: 37786 - protein, 45 aa, Artificial Sequence
  Quasi-synthetic sequence derived from human genome
SACIPVFRLARRRKKILFYCHFPDLLLTKRDSFLKRLYRAPIDWI

SEQ ID NO: 37787 - protein, 45 aa, Artificial Sequence
  Quasi-synthetic sequence derived from human genome
RRSRWPFSKARSFCKTHASLFKKILLGLLCLAYAAYLLAACILNF

SEQ ID NO: 37788 - protein, 45 aa, Artificial Sequence
  Quasi-synthetic sequence derived from human genome
LRSICMHTKKRVSSFRGNKIGLKDVITLRRHVETKVRAKIRKRKV

SEQ ID NO: 37789 - protein, 45 aa, Artificial Sequence
  Quasi-synthetic sequence derived from human genome
FRKPQRSFFGKLLREFRLVAADRRSWKILLFGVINLICTGFLLMW

SEQ ID NO: 37790 - protein, 45 aa, Artificial Sequence
  Quasi-synthetic sequence derived from human genome
SRQKWIVKPPASARGIGIQVIHKWSQLPKRRPLLVQRYLHKPYLI

SEQ ID NO: 37791 - protein, 45 aa, Artificial Sequence
  Quasi-synthetic sequence derived from human genome
LKSNWLGLRFLRALRLLELPQILQILRAIKTSNSVKFSKLLSIIL

SEQ ID NO: 37792 - protein, 45 aa, Artificial Sequence
  Quasi-synthetic sequence derived from human genome
ITRPLTYRAKRTTKRAGVMIGLAWVISFVLWAPAILFWQYFVGKR

SEQ ID NO: 37793 - protein, 45 aa, Artificial Sequence
  Quasi-synthetic sequence derived from human genome
RRRKTVRLLLANLVIFLLCFVPYNSTLAVYGLLRSKLVAASVPAR

SEQ ID NO: 37794 - protein, 45 aa, Artificial Sequence
  Quasi-synthetic sequence derived from human genome
LLKAVHIVQFIFILKLGTAFFMVLFQKPFSSGKTITKHQWIKIFK

SEQ ID NO: 37795 - protein, 45 aa, Artificial Sequence
  Quasi-synthetic sequence derived from human genome
QRARMNAAQCLAHPWLNNLAEKAKRCNRRLKSQILLKKYLMKRRW

SEQ ID NO: 37796 - protein, 45 aa, Artificial Sequence
  Quasi-synthetic sequence derived from human genome
WFICSLCVPRVRKLWSSRRPRTRRNLLLGTACAIYLGFLVSQVGR

SEQ ID NO: 37797 - protein, 45 aa, Artificial Sequence
  Quasi-synthetic sequence derived from human genome
WQRRVATWFNQPARKIRRRKARQAKARRIAPRPASGPIRPIVRCP

SEQ ID NO: 37798 - protein, 45 aa, Artificial Sequence
  Quasi-synthetic sequence derived from human genome
ACLPFVLAAAVSRKKKRRMGTYSLVPKKKTKVLKQRTVIEMFKSI

SEQ ID NO: 37799 - protein, 45 aa, Artificial Sequence
  Quasi-synthetic sequence derived from human genome
LRTFRLMRVLKLVRFLPALQRQLVVLMKTMDNVATFCMLLMLFIF

SEQ ID NO: 37800 - protein, 45 aa, Artificial Sequence
  Quasi-synthetic sequence derived from human genome
LKWKRYGRPYFCMLGAIYLLYIICFTMCCIYRPLKPRTNNRTSPR

SEQ ID NO: 37801 - protein, 45 aa, Artificial Sequence
  Quasi-synthetic sequence derived from human genome
RQQIRKLIKDGLIIRKPVTVHSRARCRKNTLARRKGRHMGIGKRK

SEQ ID NO: 37802 - protein, 45 aa, Artificial Sequence
  Quasi-synthetic sequence derived from human genome
RVCRRLRRANRVLRARCRRAVKSNACYWAVLLLVFLNTLTIASEH

SEQ ID NO: 37803 - protein, 45 aa, Artificial Sequence
  Quasi-synthetic sequence derived from human genome
KHKKKVNKGSTAARTFYLIKDIRFLLHEPIVNKFREYKVFVRKLR

SEQ ID NO: 37804 - protein, 45 aa, Artificial Sequence
  Quasi-synthetic sequence derived from human genome
RAYKLYLAVKNANKQVNSVICIQRWFRARLQEKRFIQKYHSIKKI

SEQ ID NO: 37805 - protein, 45 aa, Artificial Sequence
  Quasi-synthetic sequence derived from human genome
LRCVRLLRIFKVTRHWASLSNLVASLLNSMKSIASLLLLLFLFII

SEQ ID NO: 37806 - protein, 45 aa, Artificial Sequence
  Quasi-synthetic sequence derived from human genome
KCLYSRITVNTAFGTKFSHISFIILFKVFLFPRITISKKTKLVTL

SEQ ID NO: 37807 - protein, 45 aa, Artificial Sequence
  Quasi-synthetic sequence derived from human genome
VLKTLTKPVTLSRSKINKTKVLKMIFVHLIIFCFCFVPYNINLIL

SEQ ID NO: 37808 - protein, 45 aa, Artificial Sequence
  Quasi-synthetic sequence derived from human genome
RTALRVLQLVAGFLLPLLVMAYCYAHILAVLLVSRGQRRLRAMRL

SEQ ID NO: 37809 - protein, 45 aa, Artificial Sequence
  Quasi-synthetic sequence derived from human genome
RRRRRRPGGRVPKDRPSLTVTPKRWKLRARPSLTVTPRRLGLRAR

SEQ ID NO: 37810 - protein, 45 aa, Artificial Sequence
  Quasi-synthetic sequence derived from human genome
LPVKITVYRRSSLYIILSTGGIFLLVTLVTVCACWKPSKRKQKKL

SEQ ID NO: 37811 - protein, 45 aa, Artificial Sequence
  Quasi-synthetic sequence derived from human genome
ATMRKPRCSLPDVLGVAGLVRRRRRYALSGSVWKKRTLTWRVRSF

SEQ ID NO: 37812 - protein, 45 aa, Artificial Sequence
  Quasi-synthetic sequence derived from human genome
MRYPIWLITPQTYLIIWVITNCVSTMLLLWTFLLQRRFVKKRGKT

SEQ ID NO: 37813 - protein, 45 aa, Artificial Sequence
  Quasi-synthetic sequence derived from human genome
MSLLAIAVDRYLRVKLTVRYKRVTTHRRIWLALGLCWLVSFLVGL

SEQ ID NO: 37814 - protein, 45 aa, Artificial Sequence
  Quasi-synthetic sequence derived from human genome
LQILVWKNWLGVKRQPLWTLVLILWPVIIFIILAITRTKFPPTAK

SEQ ID NO: 37815 - protein, 45 aa, Artificial Sequence
  Quasi-synthetic sequence derived from human genome
IILVLCLRLLQSRCPRVLPKKLQNWNFLPLWMRSLKPWDAVVSKF

SEQ ID NO: 37816 - protein, 45 aa, Artificial Sequence
  Quasi-synthetic sequence derived from human genome
FHFNRYLTRRRRIEIAHALCLSERQIKIWFQNRRMKWKKDNKLKS

SEQ ID NO: 37817 - protein, 45 aa, Artificial Sequence
  Quasi-synthetic sequence derived from human genome
KVVQVFRLMRIFRVLKLARHSTGLRSLGATLKHSYREVGILLLYL

SEQ ID NO: 37818 - protein, 45 aa, Artificial Sequence
  Quasi-synthetic sequence derived from human genome
IWLKMRISKLVPWMILGSLLYVSMICVFHSKYAGFMVPYFLRKFF

SEQ ID NO: 37819 - protein, 45 aa, Artificial Sequence
  Quasi-synthetic sequence derived from human genome
KRPLRSLLGFVAANLLFWFLALTPWRVYHLISVMILGRVIMQIIK

SEQ ID NO: 37820 - protein, 45 aa, Artificial Sequence
  Quasi-synthetic sequence derived from human genome
MHLLIKYQKLLWTIPKFIVNQVRKQNTENHKKDKRAMKKLLKKMA

SEQ ID NO: 37821 - protein, 45 aa, Artificial Sequence
  Quasi-synthetic sequence derived from human genome
KKLLNGLCPKITYLFYKLFTLLSWMLSVVLLLFLNVKIALFLLLF

SEQ ID NO: 37822 - protein, 45 aa, Artificial Sequence
  Quasi-synthetic sequence derived from human genome
RVAKKLWLCNMIGDVTTEQYFALRRKKKKTIKMLMLVVVLFALCW

SEQ ID NO: 37823 - protein, 45 aa, Artificial Sequence
  Quasi-synthetic sequence derived from human genome
RWARPFYLAFVFCLALGLLQAIKLYLRRQRLLRDLRPFPAPPTHW

SEQ ID NO: 37824 - protein, 45 aa, Artificial Sequence
  Quasi-synthetic sequence derived from human genome
CKTHCLATKKLDLWRLPPFLIIHLKRFQFVNDQWIKSQKIVRFLR

SEQ ID NO: 37825 - protein, 45 aa, Artificial Sequence
  Quasi-synthetic sequence derived from human genome
ARRRKKKERRPRGTMQAINNERKASKVLGIVFFVFLIMWCPFFIT

SEQ ID NO: 37826 - protein, 45 aa, Artificial Sequence
  Quasi-synthetic sequence derived from human genome
RVALARVSSVKLISKAKIRTVKMTFIIVLAFIVCWTPFFFVQMWS

SEQ ID NO: 37827 - protein, 45 aa, Artificial Sequence
  Quasi-synthetic sequence derived from human genome
FLWFRSKQEALKQGWLHKKGGGSSTLSRRNWKKRWFVLRQSKLMY

SEQ ID NO: 37828 - protein, 45 aa, Artificial Sequence
  Quasi-synthetic sequence derived from human genome
PFYRNHKTFMVLNRKRTIYRFSAKHALFIFGPFNSIRSLAIRVSV

SEQ ID NO: 37829 - protein, 45 aa, Artificial Sequence
  Quasi-synthetic sequence derived from human genome
LHVVLSSKVCRGYLVKMGGKIKSWKKRWFVFDRLKRTLSYYVDKH

SEQ ID NO: 37830 - protein, 45 aa, Artificial Sequence
  Quasi-synthetic sequence derived from human genome
KHLKTLPMVPFKTKDSPGVFSKLGVLLRRVTRNLVRNKLAVITRL

SEQ ID NO: 37831 - protein, 45 aa, Artificial Sequence
  Quasi-synthetic sequence derived from human genome
RFIKYFVKGRQAVLSMVRKAKYRELLLSELLGRRAPVVVRLGLTY

SEQ ID NO: 37832 - protein, 45 aa, Artificial Sequence
  Quasi-synthetic sequence derived from human genome
VAKMFPKVRESQLLLNVVSQLAKRNLRLLVLGRKHMLRRSSQWSR

SEQ ID NO: 37833 - protein, 45 aa, Artificial Sequence
  Quasi-synthetic sequence derived from human genome
KNLRRRKAHFQYLLNHRLQILSPVLPVSCRDPRHLRRLRDKLLSV

SEQ ID NO: 37834 - protein, 45 aa, Artificial Sequence
  Quasi-synthetic sequence derived from human genome
KYIHKRWALVWLACLLFAAALSLILLLKKDHAKAAARGRAALLLY

SEQ ID NO: 37835 - protein, 45 aa, Artificial Sequence
  Quasi-synthetic sequence derived from human genome
ILRFLRPWYFSRSHLNYHQKAPARWEWLYSIYRKGTKAQRRNVLR

SEQ ID NO: 37836 - protein, 45 aa, Artificial Sequence
  Quasi-synthetic sequence derived from human genome
KFASYYAGIAVAVLITGYIQICFWVIAAARQIQKMRKFYFRRIMR

SEQ ID NO: 37837 - protein, 45 aa, Artificial Sequence
  Quasi-synthetic sequence derived from human genome
RKGLTRRERRELRRRTILLLYYLLRSPFYDRFSEARILFLLQLLA

SEQ ID NO: 37838 - protein, 45 aa, Artificial Sequence
  Quasi-synthetic sequence derived from human genome
LRRLPCRKRFVKNNSSQRTQKQKERILMQRKKREVLARRKYALLP

SEQ ID NO: 37839 - protein, 45 aa, Artificial Sequence
  Quasi-synthetic sequence derived from human genome
PRQRPSPRPTPRRPRPRLARPRAGQKPWLLVIRSMERVMYVMLII

SEQ ID NO: 37840 - protein, 45 aa, Artificial Sequence
  Quasi-synthetic sequence derived from human genome
LLKTVSYKACLPPSLRDLIQGLSFVTRRRIRRTVRRALRRVAACQ

SEQ ID NO: 37841 - protein, 45 aa, Artificial Sequence
  Quasi-synthetic sequence derived from human genome
NLSKSRKILRSMSRKVTTNKLLLSIIILLELAILGGLVYYKFFRS

SEQ ID NO: 37842 - protein, 45 aa, Artificial Sequence
  Quasi-synthetic sequence derived from human genome
RIVRALFEIALRKRWPTMTYRLLNLSKVIDKRLWGWASPLRQFSI

SEQ ID NO: 37843 - protein, 45 aa, Artificial Sequence
  Quasi-synthetic sequence derived from human genome
RLILMTYFKVINQMLVFFAAKNFLVVVLQLYRLVVLALAVRASLR

SEQ ID NO: 37844 - protein, 45 aa, Artificial Sequence
  Quasi-synthetic sequence derived from human genome
KLAQKGKSLSPLASITGISLFLIISMCLLFLWKKYQPYKVIKQKL

SEQ ID NO: 37845 - protein, 45 aa, Artificial Sequence
  Quasi-synthetic sequence derived from human genome
RKRLQRVMTKALDHGPDMKAVINMYGRLIHRVRYRRGLWRTRQIL

SEQ ID NO: 37846 - protein, 45 aa, Artificial Sequence
  Quasi-synthetic sequence derived from human genome
FMKLVNLYKGAVLYLLRGRKTFLIPVLFNNYITAALKLLEKLYKV

SEQ ID NO: 37847 - protein, 45 aa, Artificial Sequence
  Quasi-synthetic sequence derived from human genome
RLIQTTWRKYKLKTDLKRHQEREKAARIIQLAVINFLAKQRLRKR

SEQ ID NO: 37848 - protein, 45 aa, Artificial Sequence
  Quasi-synthetic sequence derived from human genome
MSTVMRLRTKMPWKTCWRYLTSGGFFLLILMIFSKLLKHSVIVAI

SEQ ID NO: 37849 - protein, 45 aa, Artificial Sequence
  Quasi-synthetic sequence derived from human genome
RCQFANGIFQLWFHFKRYRYRRPGPCWRPIRHCRRDPLWTPTLCR

SEQ ID NO: 37850 - protein, 45 aa, Artificial Sequence
  Quasi-synthetic sequence derived from human genome
RLFCVFYGLFGVPLCLTWISALGKFFGGRAKRLGQFLTKRGVSLR

SEQ ID NO: 37851 - protein, 45 aa, Artificial Sequence
  Quasi-synthetic sequence derived from human genome
YILFRATRKPLSGRTPRLVYKWFLLIYKLSYAFGVVGYLAIMFTM

SEQ ID NO: 37852 - protein, 45 aa, Artificial Sequence
  Quasi-synthetic sequence derived from human genome
MGSPRAARPPLLLRPVKLLRRRFRLLLALAVVSVGLWTLYLELVA

SEQ ID NO: 37853 - protein, 45 aa, Artificial Sequence
  Quasi-synthetic sequence derived from human genome
KYIHKRWALVWLACLLFAAALSLILLLKKDHAKGWLRLLKQDVRS

SEQ ID NO: 37854 - protein, 45 aa, Artificial Sequence
  Quasi-synthetic sequence derived from human genome
LKKQMKKVKKMTVKDMVTAFFSSYWSIFMTLLHFVASVFRGFFRI

SEQ ID NO: 37855 - protein, 45 aa, Artificial Sequence
  Quasi-synthetic sequence derived from human genome
FFSHFFYLSLFFWMLFKALLIIYGILVIFRRMMKSRMMVIGFAIG

SEQ ID NO: 37856 - protein, 45 aa, Artificial Sequence
  Quasi-synthetic sequence derived from human genome
CWKKYYEIVMLCGLLKMWEDLRLRVHGPFFPRILRRRKGKREFGK

SEQ ID NO: 37857 - protein, 45 aa, Artificial Sequence
  Quasi-synthetic sequence derived from human genome
KVLKVVAKVIRALLRILCCLLKAICRVLSIPVRVLVDVATFPVYT

SEQ ID NO: 37858 - protein, 45 aa, Artificial Sequence
  Quasi-synthetic sequence derived from human genome
FLLLFQYCLPLGFILVCYARIYRRLQRQGRVFHKGTYSLRAGHMK

SEQ ID NO: 37859 - protein, 45 aa, Artificial Sequence
  Quasi-synthetic sequence derived from human genome
GRPRRPRRRASRAFCPRPCALPGRPGLTLLCRPRCRRQPRLRLPT

SEQ ID NO: 37860 - protein, 45 aa, Artificial Sequence
  Quasi-synthetic sequence derived from human genome
ILIQRKYRAHLCTKHHLQFLQVQNAVIKIQSSYRRWMIRKRMREM

SEQ ID NO: 37861 - protein, 45 aa, Artificial Sequence
  Quasi-synthetic sequence derived from human genome
FLLLILLCMSLLLFQVIRLYQRRRWTIRAMHLFPAPPAHWFYGHK

SEQ ID NO: 37862 - protein, 45 aa, Artificial Sequence
  Quasi-synthetic sequence derived from human genome
PQPKGQKKKKIVKYGMGGLIILFLIAIIWFPLLFMSLVRSVVGVV

SEQ ID NO: 37863 - protein, 45 aa, Artificial Sequence
  Quasi-synthetic sequence derived from human genome
RRNKRIWASGVVLLETVLFGFLLLYFPVFILYFKPSVFRCIALRW

SEQ ID NO: 37864 - protein, 45 aa, Artificial Sequence
  Quasi-synthetic sequence derived from human genome
IYPCSSKEFKRAFVRILGCQCRGRGRRRRRRRRRLGGCAYTYRPW

SEQ ID NO: 37865 - protein, 45 aa, Artificial Sequence
  Quasi-synthetic sequence derived from human genome
FRRSRSPMHYMYRPRSRSPRICHRFISRYRSRSRSRSPYRIRNPF

SEQ ID NO: 37866 - protein, 45 aa, Artificial Sequence
  Quasi-synthetic sequence derived from human genome
VPNRARRKKSSARKFGLQKLWEWCLGLVQMSSLPWRVVIGRLGRI

SEQ ID NO: 37867 - protein, 45 aa, Artificial Sequence
  Quasi-synthetic sequence derived from human genome
RLFRVMRLVKLLSKGEGIRTLLWTFIKSFQALPYVALLIAMIFFI

SEQ ID NO: 37868 - protein, 45 aa, Artificial Sequence
  Quasi-synthetic sequence derived from human genome
RLFDYRGRLSPVPVPRAVPVKRPRVTVPLVRRVKTNVPVKLFARS

SEQ ID NO: 37869 - protein, 45 aa, Artificial Sequence
  Quasi-synthetic sequence derived from human genome
MMRFMLLFSRQGKLRLQKWYLATSDKERKKMVRELMQVVLARKPK

SEQ ID NO: 37870 - protein, 45 aa, Artificial Sequence
  Quasi-synthetic sequence derived from human genome
LYAIVLCKHKGITSGRAQLLWFLQTFFFGIASLTILIAYKRKRQK

SEQ ID NO: 37871 - protein, 45 aa, Artificial Sequence
  Quasi-synthetic sequence derived from human genome
VRAVYRVLKNCPSVALKKKAKCLLSKWKAVYKQTHSKARNSPKLF

SEQ ID NO: 37872 - protein, 45 aa, Artificial Sequence
  Quasi-synthetic sequence derived from human genome
MRSGGRGRPRLRLGERGLMEPLLPPKRRLLPRVRLLPLLLALAVG

SEQ ID NO: 37873 - protein, 45 aa, Artificial Sequence
  Quasi-synthetic sequence derived from human genome
WRNNFWIILAVAIIVVSVGLGLILYCVCKWQLRRGKKWEIAKPLK

SEQ ID NO: 37874 - protein, 45 aa, Artificial Sequence
  Quasi-synthetic sequence derived from human genome
ILVMLGLLSSILMQLKILVSASFYPSVERKRIQYLHAKLLKKRSK

SEQ ID NO: 37875 - protein, 45 aa, Artificial Sequence
  Quasi-synthetic sequence derived from human genome
LKVISRGRSAKAPGWLSYSLRFGGQKHVVHMRVKKLLVSRHLPVF

SEQ ID NO: 37876 - protein, 45 aa, Artificial Sequence
  Quasi-synthetic sequence derived from human genome
RYIAICKPLRYTMILTSKIISLIAGIAVLRSLYMVVPLVFLLLRL

SEQ ID NO: 37877 - protein, 45 aa, Artificial Sequence
  Quasi-synthetic sequence derived from human genome
LLRAEKKLRPHLAKVLVYELLLGKGFRGGGGRWKALLGRHQARLK

SEQ ID NO: 37878 - protein, 45 aa, Artificial Sequence
  Quasi-synthetic sequence derived from human genome
FLQRRQRRRQDSRVVARSVRILVASFFLCWFPNHVVTLWGVLVKF

SEQ ID NO: 37879 - protein, 45 aa, Artificial Sequence
  Quasi-synthetic sequence derived from human genome
KIAARMLWRILNGHSLTRRERRQFLRICADLFRLVPFLVFVVVPF

SEQ ID NO: 37880 - protein, 45 aa, Artificial Sequence
  Quasi-synthetic sequence derived from human genome
RVLKRKTFNKVLGHVNNILISAVLPTAFRVAKKRAPKVLGTTLVV

SEQ ID NO: 37881 - protein, 45 aa, Artificial Sequence
  Quasi-synthetic sequence derived from human genome
KKFVIKPIDKKAPDFVFYAPRLRINKRILALCMGNHELYMRRRKP

SEQ ID NO: 37882 - protein, 45 aa, Artificial Sequence
  Quasi-synthetic sequence derived from human genome
FRCVRLLRIFKVTRHWTSLSNLVASLLNSMKSIASLLLLLFLFII

SEQ ID NO: 37883 - protein, 45 aa, Artificial Sequence
  Quasi-synthetic sequence derived from human genome
ARSLALALLCLVLSTCVGPYLFPYFIPLNGDRLLRNKKRKARWLR

SEQ ID NO: 37884 - protein, 45 aa, Artificial Sequence
  Quasi-synthetic sequence derived from human genome
CIKMQKTIRMWLCKRRHKPRIDGLVKVGTLKKRLDKFNEVVSVLK

SEQ ID NO: 37885 - protein, 45 aa, Artificial Sequence
  Quasi-synthetic sequence derived from human genome
RRKRKRSKRKKEVPFFGRRMHHTCPCLPGLACLRTSFNRFICLAQ

SEQ ID NO: 37886 - protein, 45 aa, Artificial Sequence
  Quasi-synthetic sequence derived from human genome
RRSVQISVLLPAVNIRRRIKLTFPQPARPRAPRSLCLWQTWFAGK

SEQ ID NO: 37887 - protein, 45 aa, Artificial Sequence
  Quasi-synthetic sequence derived from human genome
KRRKKRYLRHDKPPYTYLAMIALVIQAAPSRRLKLAQIIRQVQAV

SEQ ID NO: 37888 - protein, 45 aa, Artificial Sequence
  Quasi-synthetic sequence derived from human genome
QVWKFQRYQLIMTFHDRPVLPPPMIILSHIYIIIMRLSGRCRKKR

SEQ ID NO: 37889 - protein, 45 aa, Artificial Sequence
  Quasi-synthetic sequence derived from human genome
RIRQLPVGKKEVEHYRKRWREINARPIKKVAEAKARKKRRMLKRL

SEQ ID NO: 37890 - protein, 45 aa, Artificial Sequence
  Quasi-synthetic sequence derived from human genome
IPSYRLNKICSGLSFQRKNQFMQRLHNYWLLKRQARNGVPLIRRL

SEQ ID NO: 37891 - protein, 45 aa, Artificial Sequence
  Quasi-synthetic sequence derived from human genome
KVPYKGIVISLVLVLIPCTIGIVLKSKRPQYMRYVIKGGMIIILL

SEQ ID NO: 37892 - protein, 45 aa, Artificial Sequence
  Quasi-synthetic sequence derived from human genome
KIKHFSQLKSELFLKDNSLRRILSLLMELKVAAQKNFILKRLFWK

SEQ ID NO: 37893 - protein, 45 aa, Artificial Sequence
  Quasi-synthetic sequence derived from human genome
FFSVALLVILACVLWKKRIKPIVWPSLPDHKKTLEHLCKKPRKNL

SEQ ID NO: 37894 - protein, 45 aa, Artificial Sequence
  Quasi-synthetic sequence derived from human genome
LSFFSVALLVILACVLWKKRIKPIVWPSLPDHKKTLEHLCKKPRK

SEQ ID NO: 37895 - protein, 45 aa, Artificial Sequence
  Quasi-synthetic sequence derived from human genome
HALPFFCFLLGKCFKKGLKGKGFVLLVKLACIVVASFVLCWLPFF

SEQ ID NO: 37896 - protein, 45 aa, Artificial Sequence
  Quasi-synthetic sequence derived from human genome
VLIGKTHLTMALTVIAGLVVIFMMLGGTFLYWRGRRIQNKRAMRR

SEQ ID NO: 37897 - protein, 45 aa, Artificial Sequence
  Quasi-synthetic sequence derived from human genome
PKVVRKADRSRTSILIICILITGLGIISVISHLTKRRRSQRNRRV

SEQ ID NO: 37898 - protein, 45 aa, Artificial Sequence
  Quasi-synthetic sequence derived from human genome
LQLLVFTALAILIMRLKMFLTPHMCVMASLICSRQLFGWLFRRVR

SEQ ID NO: 37899 - protein, 45 aa, Artificial Sequence
  Quasi-synthetic sequence derived from human genome
RFQVTHFSWYWLWYTTKNCVGGLARKAWERLRLHRVNLIALQRRR

SEQ ID NO: 37900 - protein, 45 aa, Artificial Sequence
  Quasi-synthetic sequence derived from human genome
WLCYVNSTINPMCYALCNKAFRDTFRLLLLCRWDKRRWRKIPKRP

SEQ ID NO: 37901 - protein, 45 aa, Artificial Sequence
  Quasi-synthetic sequence derived from human genome
IVGMFLAELIEKYFVSPTLFRVIRLARIGRILRLIKGAKGIRTLL

SEQ ID NO: 37902 - protein, 45 aa, Artificial Sequence
  Quasi-synthetic sequence derived from human genome
HKIAKRYSSIPQMWSRCLLRHCYGLWFICLPAYVKVCHSKVRALK

SEQ ID NO: 37903 - protein, 45 aa, Artificial Sequence
  Quasi-synthetic sequence derived from human genome
KFFMARVRLQLKIILCFSPVGRTLRVRARKFPAIVNCTAIDWFHA

SEQ ID NO: 37904 - protein, 45 aa, Artificial Sequence
  Quasi-synthetic sequence derived from human genome
MLSSVSTWLAIILLIFISLFPEILLIVLKNVRRRSARRNLSCRRA

SEQ ID NO: 37905 - protein, 45 aa, Artificial Sequence
  Quasi-synthetic sequence derived from human genome
AIIHRLRRRGRSGLQPRVGKSTAILLGITTLFTLLWAPRVFVMLY

SEQ ID NO: 37906 - protein, 45 aa, Artificial Sequence
  Quasi-synthetic sequence derived from human genome
IKIQRWYRAYKTLHDTRTHFLKTKAAVISLQSAYRGWKVRKQIRR

SEQ ID NO: 37907 - protein, 45 aa, Artificial Sequence
  Quasi-synthetic sequence derived from human genome
RRCGRPRRRDPRRRRTPALPRPWPGRGGPGRSLLHRHLFIQQLLR

SEQ ID NO: 37908 - protein, 45 aa, Artificial Sequence
  Quasi-synthetic sequence derived from human genome
NGPFLRKCFAISLLVICIIISIGIFYGFVANHQVRTRIKRSRKLA

SEQ ID NO: 37909 - protein, 45 aa, Artificial Sequence
  Quasi-synthetic sequence derived from human genome
RVLPSVFWSPPSRKKPVLSARNSRMFGHLSPVRIPHLRGKFNLRL

SEQ ID NO: 37910 - protein, 45 aa, Artificial Sequence
  Quasi-synthetic sequence derived from human genome
KRCKKLEAVYKEFELQKVCYLPLNTFLLKPIQRLLHYRLLLRRLC

SEQ ID NO: 37911 - protein, 45 aa, Artificial Sequence
  Quasi-synthetic sequence derived from human genome
LAMLLRLYLVPRAVLLRSGVLLNASYRSIGALNQVRFRHWFVAKL

SEQ ID NO: 37912 - protein, 45 aa, Artificial Sequence
  Quasi-synthetic sequence derived from human genome
YRGKNPLLVPLLYDFRRMTARRRVNRKMGFHVIYKTPCGLCLRTM

SEQ ID NO: 37913 - protein, 45 aa, Artificial Sequence
  Quasi-synthetic sequence derived from human genome
RRGRLARCWARCRDWRRMALVSALLLMLFCVALWPVQCALKTGNL

SEQ ID NO: 37914 - protein, 45 aa, Artificial Sequence
  Quasi-synthetic sequence derived from human genome
KRRQARRTAVIVQQKLRSSLLTKKQDQAARKIMRFLRRCRHSPLV

SEQ ID NO: 37915 - protein, 45 aa, Artificial Sequence
  Quasi-synthetic sequence derived from human genome
LFQMPLFLKLFICFIFIRSSPTIVSNKRVSKRKFIPPAFTNVSTK

SEQ ID NO: 37916 - protein, 45 aa, Artificial Sequence
  Quasi-synthetic sequence derived from human genome
KRDVAHKVFATTSIKSFFRQLNLYGFRKRRQCTFRTFTRIFSAKR

SEQ ID NO: 37917 - protein, 45 aa, Artificial Sequence
  Quasi-synthetic sequence derived from human genome
LKKGKICCCCRAKFPLFSWPPSCLFCKRAVCTSCSIKMKMPSKKF

SEQ ID NO: 37918 - protein, 45 aa, Artificial Sequence
  Quasi-synthetic sequence derived from human genome
VRRLPFGKCRIPNNSLPYFHKRPQARMLLLALFCVAVSVVWGVFR

SEQ ID NO: 37919 - protein, 45 aa, Artificial Sequence
  Quasi-synthetic sequence derived from human genome
KATTIQKHVRGWMARRHFQRLRDAAIVIQCAFRMLKARRELKALR

SEQ ID NO: 37920 - protein, 45 aa, Artificial Sequence
  Quasi-synthetic sequence derived from human genome
MIKQLAEITYDIFKKKAHKLTSAPLKQNFQKLLKLFYIKKLKPLY

SEQ ID NO: 37921 - protein, 45 aa, Artificial Sequence
  Quasi-synthetic sequence derived from human genome
MRRPGAPASWIWWRMLRQVLRRGLQSFCHRLGLCVSRHPVFFLTV

SEQ ID NO: 37922 - protein, 45 aa, Artificial Sequence
  Quasi-synthetic sequence derived from human genome
LRALLLWGRRLRPLLRAPALAAVPGGKPILCPRRTTAQLGPRRNP

SEQ ID NO: 37923 - protein, 45 aa, Artificial Sequence
  Quasi-synthetic sequence derived from human genome
RIIYNLFHKTVPEFKYRILQILRVQNQFLWEKYKRKKEYMNRKMF

SEQ ID NO: 37924 - protein, 45 aa, Artificial Sequence
  Quasi-synthetic sequence derived from human genome
KVAVIASIVSCAIILLMSMAFLTCCLLKCVKKSKRRRSNRSAQLW

SEQ ID NO: 37925 - protein, 45 aa, Artificial Sequence
  Quasi-synthetic sequence derived from human genome
IVGMFLADIIEKYFVSPTLFRVIRLARIGRILRLIKGAKGIRTLL

SEQ ID NO: 37926 - protein, 45 aa, Artificial Sequence
  Quasi-synthetic sequence derived from human genome
ALLCLHRTLTSWLRVRFGTWNWIWRRCCRAASAAVLAPLGFTLRK

SEQ ID NO: 37927 - protein, 45 aa, Artificial Sequence
  Quasi-synthetic sequence derived from human genome
AAGCLKPKFPFLSIRRSALLYIALHLKAFNPKGSEYTRKKYKKKM

SEQ ID NO: 37928 - protein, 45 aa, Artificial Sequence
  Quasi-synthetic sequence derived from human genome
VSFPVPTWILVLSLSLAGALFLLAGLVAVALVVRKVKLRNLQKKR

SEQ ID NO: 37929 - protein, 45 aa, Artificial Sequence
  Quasi-synthetic sequence derived from human genome
DFPARWSFRAYTSVLYFNPWMRIFIQAKRVKTKHLCYCLYRPRKY

SEQ ID NO: 37930 - protein, 45 aa, Artificial Sequence
  Quasi-synthetic sequence derived from human genome
KKTFIVLNKGKAIFRFSATPALYLLSPFSVVRRGAIKVLIHALFS

SEQ ID NO: 37931 - protein, 45 aa, Artificial Sequence
  Quasi-synthetic sequence derived from human genome
RNLRLPKRLRVVYFLARTRLAQRLIMAGTVVWIGILVYTDPAGLR

SEQ ID NO: 37932 - protein, 45 aa, Artificial Sequence
  Quasi-synthetic sequence derived from human genome
RRYRMTHSEKKRLKQCNVITRLRGLQVPVGLPFLLILLGLYLMPL

SEQ ID NO: 37933 - protein, 45 aa, Artificial Sequence
  Quasi-synthetic sequence derived from human genome
LALLCLVLSTCVGPYLFPYFIPLNGDRLLRNKKRKARGTMVRWLR

SEQ ID NO: 37934 - protein, 45 aa, Artificial Sequence
  Quasi-synthetic sequence derived from human genome
YLTYLLLWVKQRKDLLHLCCKKLKILGMPFRNIRSILKMVNLDCI

SEQ ID NO: 37935 - protein, 45 aa, Artificial Sequence
  Quasi-synthetic sequence derived from human genome
TRTLLLKNYLIKCRTKKSSVQEILFPLFFLFWLILISMMHPNKKY

SEQ ID NO: 37936 - protein, 45 aa, Artificial Sequence
  Quasi-synthetic sequence derived from human genome
TMRRMALSMIERRKRWRTIKLLLRRGADPNLCCVPMQVLFLAVKA

SEQ ID NO: 37937 - protein, 45 aa, Artificial Sequence
  Quasi-synthetic sequence derived from human genome
RTIARLRLKKIFSGVFVKVTPQNLKMLRIVEPYVTWGFPNLKSVR

SEQ ID NO: 37938 - protein, 45 aa, Artificial Sequence
  Quasi-synthetic sequence derived from human genome
VRPWKRAAILNYTKGLYFQAFGGRRRCLSKSVAPLLAHGYRRFLP

SEQ ID NO: 37939 - protein, 45 aa, Artificial Sequence
  Quasi-synthetic sequence derived from human genome
YFLITFLFGMVVLALVVWKIFTLSRATAVKERGKNRKKVLTLLGL

SEQ ID NO: 37940 - protein, 45 aa, Artificial Sequence
  Quasi-synthetic sequence derived from human genome
LMAFLIMVVVYLRIYVYVKRKTNVLSPHTSGSISRRRTPMKLMKT

SEQ ID NO: 37941 - protein, 45 aa, Artificial Sequence
  Quasi-synthetic sequence derived from human genome
IRYYRRYKVKSYIHEVARRFHGVKTMRDYGKHVKWPSPPKVLRRF

SEQ ID NO: 37942 - protein, 45 aa, Artificial Sequence
  Quasi-synthetic sequence derived from human genome
FGRRVLCYPLYRHFKLVMKAYRDTIKILQLGKSAVLKCLLDIHKI

SEQ ID NO: 37943 - protein, 45 aa, Artificial Sequence
  Quasi-synthetic sequence derived from human genome
LKSFQKIQVRLVRELEKKFSGKHVVFIAQRRILPKPTRKSRTKNK

SEQ ID NO: 37944 - protein, 45 aa, Artificial Sequence
  Quasi-synthetic sequence derived from human genome
VHLLKIKKTFCLCKRLTELKDNHCEQLRVKIRKLKNKASVLQKRL

SEQ ID NO: 37945 - protein, 45 aa, Artificial Sequence
  Quasi-synthetic sequence derived from human genome
FRKERIEGLRKRRRLLSIIVVLVVTFALCWMPYHLVKTLYMLGSL

SEQ ID NO: 37946 - protein, 45 aa, Artificial Sequence
  Quasi-synthetic sequence derived from human genome
FFRKLTTIFPLNWKYRKALSLGCQRVTLHKNMFLTYILNSMIIII

SEQ ID NO: 37947 - protein, 45 aa, Artificial Sequence
  Quasi-synthetic sequence derived from human genome
KSLKFSLFIVCTVTLTLFLMTILTVTKFRGFCFICYKTAQRLVFK

SEQ ID NO: 37948 - protein, 45 aa, Artificial Sequence
  Quasi-synthetic sequence derived from human genome
FITARTLMKMPNIKISRPLKVLLTVVIVFIVTQLPYNIVKFCRAI

SEQ ID NO: 37949 - protein, 45 aa, Artificial Sequence
  Quasi-synthetic sequence derived from human genome
RYVKIKRNWRKPRGIDNRVRRRFKGQILMPNIGYGSNKKTKHMLP

SEQ ID NO: 37950 - protein, 45 aa, Artificial Sequence
  Quasi-synthetic sequence derived from human genome
LVPPALRGLVRPHKKRKKLSSSCRKAKRAKSQNPLRSFKHKGKKF

SEQ ID NO: 37951 - protein, 45 aa, Artificial Sequence
  Quasi-synthetic sequence derived from human genome
PTKHSRKVNPSTKYLVISLVILSFLFLLSVIVIFIIHVYQKIKYR

SEQ ID NO: 37952 - protein, 45 aa, Artificial Sequence
  Quasi-synthetic sequence derived from human genome
TGIIKILLRRPNEKKSKAVRLIFVIMIIFFLFWTPYNLTILISVF

SEQ ID NO: 37953 - protein, 45 aa, Artificial Sequence
  Quasi-synthetic sequence derived from human genome
CRRHVRAARPVPWNALLRRRARGPPAAVLACLLPDRALRTRLVRG

SEQ ID NO: 37954 - protein, 45 aa, Artificial Sequence
  Quasi-synthetic sequence derived from human genome
IFLIVETRIDSEVYKTARALRIVRFTKILSLLRLLRLSRLIRYIH

SEQ ID NO: 37955 - protein, 45 aa, Artificial Sequence
  Quasi-synthetic sequence derived from human genome
RVLPPVVWSPPSRKKPVLSARNSRMFGYLSPVRIPRLRGKFNLQL

SEQ ID NO: 37956 - protein, 45 aa, Artificial Sequence
  Quasi-synthetic sequence derived from human genome
ISLRFKRTHIKMKKQPKGYGLRCHRAIITICRLIGIKDMYAKVSG

SEQ ID NO: 37957 - protein, 45 aa, Artificial Sequence
  Quasi-synthetic sequence derived from human genome
RGLILPVRTLLLKFFSKIYQTEELRSCRFRYRSKVLSRWLAGLPL

SEQ ID NO: 37958 - protein, 45 aa, Artificial Sequence
  Quasi-synthetic sequence derived from human genome
IPKFARWFSVPWKVIFVFALLAFLFFTSWYSSYGFTRRWNCILMR

SEQ ID NO: 37959 - protein, 45 aa, Artificial Sequence
  Quasi-synthetic sequence derived from human genome
RSRFISHSSSSSWGMARGSIFKAIAHFKRTTFLKKHRMLGRLKYK

SEQ ID NO: 37960 - protein, 45 aa, Artificial Sequence
  Quasi-synthetic sequence derived from human genome
RRQWKCVQRRCLRHLAHRLRRRHQRCQRRTPLAVAPPTGKHARRK

SEQ ID NO: 37961 - protein, 45 aa, Artificial Sequence
  Quasi-synthetic sequence derived from human genome
MVQKHMRGWLQRKKFLRERRAALIIQQYFRGQQTVRKAITAVALK

SEQ ID NO: 37962 - protein, 45 aa, Artificial Sequence
  Quasi-synthetic sequence derived from human genome
FTRGSRGRKNSRTMLLPLLRRFPEQVRVSLFHTPHLRGLLRLLIP

SEQ ID NO: 37963 - protein, 45 aa, Artificial Sequence
  Quasi-synthetic sequence derived from human genome
TALRGAPRLLSRVQPRAPCLRRLWGRGARPEVAGRRRAWAWGWRR

SEQ ID NO: 37964 - protein, 45 aa, Artificial Sequence
  Quasi-synthetic sequence derived from human genome
RYLAIVHPMKSRLRRTMLVAKVTCIIIWLLAGLASLPAIIHRNVF

SEQ ID NO: 37965 - protein, 45 aa, Artificial Sequence
  Quasi-synthetic sequence derived from human genome
KSFDALNFVTMLKMVWISKASAIQRKGRAGRCRPGICFRLFSRLR

SEQ ID NO: 37966 - protein, 45 aa, Artificial Sequence
  Quasi-synthetic sequence derived from human genome
RVLQEAWMFYKHTRRKESHAARRHQRKLLAAINAFRQVRLKHRKL

SEQ ID NO: 37967 - protein, 45 aa, Artificial Sequence
  Quasi-synthetic sequence derived from human genome
RRKEILAKYPAIKALMRPDPRLKWAVLVLVLVQMLACWLVRGLAW

SEQ ID NO: 37968 - protein, 45 aa, Artificial Sequence
  Quasi-synthetic sequence derived from human genome
LIARYIKLRTGKTRTRKQVSSHIQVLARRKAREIQAKLKFWQGAL

SEQ ID NO: 37969 - protein, 45 aa, Artificial Sequence
  Quasi-synthetic sequence derived from human genome
FLLPSRPAQRGYHTRLNRLPGAAARCLRKGRRRLVGKVIPLTVSL

SEQ ID NO: 37970 - protein, 45 aa, Artificial Sequence
  Quasi-synthetic sequence derived from human genome
YVYKIGIYGWRKRCLYLFVLLLLIILVVNLALTIWILKVMWFSPA

SEQ ID NO: 37971 - protein, 45 aa, Artificial Sequence
  Quasi-synthetic sequence derived from human genome
LKKIFLAAKKKKASVHLPRIGHATKGFNWYGTERLIRKHLAARGI

SEQ ID NO: 37972 - protein, 45 aa, Artificial Sequence
  Quasi-synthetic sequence derived from human genome
GFLVKRGHIVHNWKARWFILRQNTLVYYKLEGGRRVTPPKGRILL

SEQ ID NO: 37973 - protein, 45 aa, Artificial Sequence
  Quasi-synthetic sequence derived from human genome
RRRRARLRFMKQKFNIVCLKISGFTTCCCFQILQISREYGFGVLL

SEQ ID NO: 37974 - protein, 45 aa, Artificial Sequence
  Quasi-synthetic sequence derived from human genome
RMWRIRRRYCQVLNAVRIIQAYWRCRSCASRGFIKGQYRVTANQL

SEQ ID NO: 37975 - protein, 45 aa, Artificial Sequence
  Quasi-synthetic sequence derived from human genome
FGLYFLVVALPYANSCANPILYGFLSYRFKQGFRRVLLRPSRRVR

SEQ ID NO: 37976 - protein, 45 aa, Artificial Sequence
  Quasi-synthetic sequence derived from human genome
LIKQVLNWMLRKLSCRCCARCCPAPGAPLARRNAITPGSRLRRRL

SEQ ID NO: 37977 - protein, 45 aa, Artificial Sequence
  Quasi-synthetic sequence derived from human genome
LARSLLVLRLCAWPALLARHEQLLYVSRKLLGQRLFNKLMKMTFY

SEQ ID NO: 37978 - protein, 45 aa, Artificial Sequence
  Quasi-synthetic sequence derived from human genome
TFWVKVASCWACVLLYLGLLLAPLCWPPTQKPQPLILRRRRHRII

SEQ ID NO: 37979 - protein, 45 aa, Artificial Sequence
  Quasi-synthetic sequence derived from human genome
KQNIVARKIVKMTKQPAKKKPPPSREKKVTRTILAILLAFIITWA

SEQ ID NO: 37980 - protein, 45 aa, Artificial Sequence
  Quasi-synthetic sequence derived from human genome
KLVSPKWKNFKGLKLQWRDKIRLNNAIWRAWYMQYLEKRKNPVCH

SEQ ID NO: 37981 - protein, 45 aa, Artificial Sequence
  Quasi-synthetic sequence derived from human genome
YVYPLALYGFMVFFLINPTKTFYYKSRFWLLKLLFRVFTAPFHKV

SEQ ID NO: 37982 - protein, 45 aa, Artificial Sequence
  Quasi-synthetic sequence derived from human genome
WRQALLAGLFASLGLVALLAALVCNTLSGLALLRARWRRRSRRPP

SEQ ID NO: 37983 - protein, 45 aa, Artificial Sequence
  Quasi-synthetic sequence derived from human genome
IPPHRLSKITNRLTIQRKSQFMQRLHSYWTLKRQSRNGVPLLRRL

SEQ ID NO: 37984 - protein, 45 aa, Artificial Sequence
  Quasi-synthetic sequence derived from human genome
LNLFSFLLRIKTSLLHEEVSLVEKKLFEKKYSVKRKKSRSKKVRR

SEQ ID NO: 37985 - protein, 45 aa, Artificial Sequence
  Quasi-synthetic sequence derived from human genome
KLFTRREHVKRHSLVHKKDKKYKCMVCKKIFMLAASVGIRHGSRR

SEQ ID NO: 37986 - protein, 45 aa, Artificial Sequence
  Quasi-synthetic sequence derived from human genome
KRTITRQQWKKKALRSMPKSRNQVLFRRNLTPSQLRTLAPPYMLL

SEQ ID NO: 37987 - protein, 45 aa, Artificial Sequence
  Quasi-synthetic sequence derived from human genome
RRYFREATMKMAVMIFKRGVFESRRKNKAVFRPKIRINLREVQTL

SEQ ID NO: 37988 - protein, 45 aa, Artificial Sequence
  Quasi-synthetic sequence derived from human genome
KFPGNPWPPYKKRTSLHPSYKGLMRLLHCKTLHIVLFTLLYKILM

SEQ ID NO: 37989 - protein, 45 aa, Artificial Sequence
  Quasi-synthetic sequence derived from human genome
IPPKFSMKRLTAGLIAVIVVVVVALVAGMAVLVITNRRKSGKYKK

SEQ ID NO: 37990 - protein, 45 aa, Artificial Sequence
  Quasi-synthetic sequence derived from human genome
YLTCLLLWVKQRRDLLHLCCKKLKILGMPFRNIRSILKMVNLDCI

SEQ ID NO: 37991 - protein, 45 aa, Artificial Sequence
  Quasi-synthetic sequence derived from human genome
RFGRNVPRYIHILLANLYVVVPPMLNPVIYGVRTKQIYKCVKKIL

SEQ ID NO: 37992 - protein, 45 aa, Artificial Sequence
  Quasi-synthetic sequence derived from human genome
LAKKIKIFFALAPVVTVKYTQSPMKKLTTLSRRVVKVLFGDKMFH

SEQ ID NO: 37993 - protein, 45 aa, Artificial Sequence
  Quasi-synthetic sequence derived from human genome
WRGYWLRQKLISQMMAAKAIQEAWRRFNKRHILHSSKSLVKKTRA

SEQ ID NO: 37994 - protein, 45 aa, Artificial Sequence
  Quasi-synthetic sequence derived from human genome
RYRVLVHPMASRRQQRRRQARVTCVLIWVVGGLLSIPTFLLRSIQ

SEQ ID NO: 37995 - protein, 45 aa, Artificial Sequence
  Quasi-synthetic sequence derived from human genome
KKFVIKPIDKKAPDFVFYAPRLRINKRILQLCMGNHELYMRRRKP

SEQ ID NO: 37996 - protein, 45 aa, Artificial Sequence
  Quasi-synthetic sequence derived from human genome
RLVALKKFVAVLAKYFPGRPLVQNFLHSVNEWLKRQKRNKIPYSF

SEQ ID NO: 37997 - protein, 45 aa, Artificial Sequence
  Quasi-synthetic sequence derived from human genome
TVKGLQLPTPVWFHVLFYLAVGIMFLVNTVLWVTIRKELKRKKKW

SEQ ID NO: 37998 - protein, 45 aa, Artificial Sequence
  Quasi-synthetic sequence derived from human genome
KLRTKAMARRVLAGIWVLSFLLATPVLAYRTVVPWKTNMSLCFPR

SEQ ID NO: 37999 - protein, 45 aa, Artificial Sequence
  Quasi-synthetic sequence derived from human genome
LLIPYLLTTKKKWKDCKIRVFIGGKINRIDHDRRAMATLLSKFRI

SEQ ID NO: 38000 - protein, 45 aa, Artificial Sequence
  Quasi-synthetic sequence derived from human genome
VKALRAFRVLRPLRLVSGVPSLHIVLNSIMKALVPLLHIALLVLF

SEQ ID NO: 38001 - protein, 46 aa, Artificial Sequence
  Quasi-synthetic sequence derived from human genome
RARLIPIIVLLLQKAWRGTLARWRCRRLRAIYTIMRWFRRHKVRAH

SEQ ID NO: 38002 - protein, 46 aa, Artificial Sequence
  Quasi-synthetic sequence derived from human genome
LLLKRGSCRSTWLRVRKARPQLILSRRPRRRLGSLRWCGRRRLRWR

SEQ ID NO: 38003 - protein, 46 aa, Artificial Sequence
  Quasi-synthetic sequence derived from human genome
YPVKIKVRFSFFLQIYLIMIFLGLYINFRHLYKQRRRRYGQKKKKI

SEQ ID NO: 38004 - protein, 46 aa, Artificial Sequence
  Quasi-synthetic sequence derived from human genome
IFRGKKARRHLKMMHIAATLIQRRFRTLMMRRRFLSLKKTAILIQR

SEQ ID NO: 38005 - protein, 46 aa, Artificial Sequence
  Quasi-synthetic sequence derived from human genome
IFFDIKLLRNIPRWTHLLRLLRLIILLRIFHLFHQKRQLEKLIRRR

SEQ ID NO: 38006 - protein, 46 aa, Artificial Sequence
  Quasi-synthetic sequence derived from human genome
RIYAVSTLLLFLLFFLFRLLLRFLRLCRSFYITCRRLRCFPQPPRR

SEQ ID NO: 38007 - protein, 46 aa, Artificial Sequence
  Quasi-synthetic sequence derived from human genome
AKGLLIFLLLVILAMGLWVIRVQKRHKMPRMKKLMRNRMKLRKEAK

SEQ ID NO: 38008 - protein, 46 aa, Artificial Sequence
  Quasi-synthetic sequence derived from human genome
IFHFLYRKNRSRIPLLRKRWFQLGHSMNPRARKNRSRIPLLRKRRF

SEQ ID NO: 38009 - protein, 46 aa, Artificial Sequence
  Quasi-synthetic sequence derived from human genome
SKKKKKRYLRASSNRNFLLTMRPFLKRAILVLSYVLVILYFRLWIM

SEQ ID NO: 38010 - protein, 46 aa, Artificial Sequence
  Quasi-synthetic sequence derived from human genome
RCLRGFFIKRRFRSLRHKIILLQSRARGYLARQRYQQMRRSLVKFR

SEQ ID NO: 38011 - protein, 46 aa, Artificial Sequence
  Quasi-synthetic sequence derived from human genome
CRGKLLVHSLNLLAKQGLRLLRGLRRRNVQKKVALAKKLLAKLRFL

SEQ ID NO: 38012 - protein, 46 aa, Artificial Sequence
  Quasi-synthetic sequence derived from human genome
IRIFKRKKRIKRRALLFLSYILTHFIFLALLLILIVLLRHTDCFYY

SEQ ID NO: 38013 - protein, 46 aa, Artificial Sequence
  Quasi-synthetic sequence derived from human genome
LRAQMLIRIVLFLQKVWRGTLARMRYKRTKAALTIIRYYRRYKVKS

SEQ ID NO: 38014 - protein, 46 aa, Artificial Sequence
  Quasi-synthetic sequence derived from human genome
GFLARKQYRKVLYCVVIIQKNYRAFLLRRRFLHLKKAAIVFQKQLR

SEQ ID NO: 38015 - protein, 46 aa, Artificial Sequence
  Quasi-synthetic sequence derived from human genome
RRWGQAISKSKLSRRWRRWNRFNRRRCRAAVKSVTFYWLVIVLVFL

SEQ ID NO: 38016 - protein, 46 aa, Artificial Sequence
  Quasi-synthetic sequence derived from human genome
LTFNKFWRRYGKLSRHLMKVKLKKYTKFLFVRDPFVRLISAFRSKF

SEQ ID NO: 38017 - protein, 46 aa, Artificial Sequence
  Quasi-synthetic sequence derived from human genome
MKRALGRRKGVWLRLRKILFCVLGLYIAIPFLIKLCPGIQAKLIFL

SEQ ID NO: 38018 - protein, 46 aa, Artificial Sequence
  Quasi-synthetic sequence derived from human genome
FLGHRLLKRLLGPKLRRFLKPQGHPRLLLWFKRGLALAAFLGLVLW

SEQ ID NO: 38019 - protein, 46 aa, Artificial Sequence
  Quasi-synthetic sequence derived from human genome
RFRSLLVRRRFISLKKATIFVQRKYRATICAKHKLYQFLHLRKAAI

SEQ ID NO: 38020 - protein, 46 aa, Artificial Sequence
  Quasi-synthetic sequence derived from human genome
VKRFLKHAGKWSLRWFLSPRWILQFRRWARKWSRFTRSSFQVRWAA

SEQ ID NO: 38021 - protein, 46 aa, Artificial Sequence
  Quasi-synthetic sequence derived from human genome
IFHFLYRKNRSRIPLLRKPWFQLGHSMNPRARKNRSRIPLLRKRRF

SEQ ID NO: 38022 - protein, 46 aa, Artificial Sequence
  Quasi-synthetic sequence derived from human genome
WWRGVLVRRTLLVAALRAWMIQCWWRTLVQRRIRQRRQALLRVYVI

SEQ ID NO: 38023 - protein, 46 aa, Artificial Sequence
  Quasi-synthetic sequence derived from human genome
GYRLRRVIAAFYFPKREKKRILFLYNDLLKKRAAFTKLRRAAILRR

SEQ ID NO: 38024 - protein, 46 aa, Artificial Sequence
  Quasi-synthetic sequence derived from human genome
IPRWTHLLRLLRLIILLRIFHLFHQKRQLEKLIRRRVSENKRRYTR

SEQ ID NO: 38025 - protein, 46 aa, Artificial Sequence
  Quasi-synthetic sequence derived from human genome
RSLLLGPARLCLRLLLLLGYRRRCPPLLRGLVQRWRYGKVCLRSLL

SEQ ID NO: 38026 - protein, 46 aa, Artificial Sequence
  Quasi-synthetic sequence derived from human genome
IFFDIKLLRNIPRWTHLVRLLRLIILIRIFHLLHQKRQLEKLMRRL

SEQ ID NO: 38027 - protein, 46 aa, Artificial Sequence
  Quasi-synthetic sequence derived from human genome
RKGKRKTVKAVIDRFLRLHCGLWVRRKAGYKKKLWKKTPARKKRLR

SEQ ID NO: 38028 - protein, 46 aa, Artificial Sequence
  Quasi-synthetic sequence derived from human genome
RIPLLRKRWFQLGRSMNPRARKKRSRIPLLRKRRFQLGRSMNPRAR

SEQ ID NO: 38029 - protein, 46 aa, Artificial Sequence
  Quasi-synthetic sequence derived from human genome
RLLNKLTKWKHSRTMMLVVFKSAPILKRALKVKQAMLQLYVLKLLK

SEQ ID NO: 38030 - protein, 46 aa, Artificial Sequence
  Quasi-synthetic sequence derived from human genome
KIFRCPSPIYFANIGFFRRKLIDAVGFSPLRILRKRNKALRKIRKL

SEQ ID NO: 38031 - protein, 46 aa, Artificial Sequence
  Quasi-synthetic sequence derived from human genome
AATIIQKYWRMYVVRRRYKIRRAATIVLQSYLRGFLARNRYRKILR

SEQ ID NO: 38032 - protein, 46 aa, Artificial Sequence
  Quasi-synthetic sequence derived from human genome
RIPLLRKRRFQLGRSMNPRARKNRSRIPLLRKRRFQLGRSMNLRAR

SEQ ID NO: 38033 - protein, 46 aa, Artificial Sequence
  Quasi-synthetic sequence derived from human genome
RARKNRSRIPLLRKRRFQLYRSTNPRARKNRSRIPLLRKRRFQLYR

SEQ ID NO: 38034 - protein, 46 aa, Artificial Sequence
  Quasi-synthetic sequence derived from human genome
KLLPLRTFRVFRALKAISVVSRLKVIVGALLRSVKKLVNVIILTFF

SEQ ID NO: 38035 - protein, 46 aa, Artificial Sequence
  Quasi-synthetic sequence derived from human genome
ARLARAYRRSQRASFKRARRPGARALRLVLGIVLLFWACFLPFWLW

SEQ ID NO: 38036 - protein, 46 aa, Artificial Sequence
  Quasi-synthetic sequence derived from human genome
RIPLLRKRRFQLYRSMNPRARKNRSHIPLVRKRRFQLRRCMNPRAR

SEQ ID NO: 38037 - protein, 46 aa, Artificial Sequence
  Quasi-synthetic sequence derived from human genome
RILNKLTKWKHSRTMMLVVFKSAPILKRALKVKQAMMQLYVLKLLK

SEQ ID NO: 38038 - protein, 46 aa, Artificial Sequence
  Quasi-synthetic sequence derived from human genome
RLYLQKKIIQKHFEKKKDIRRGIGYLKLICFLIPFLLSLKKKMKVP

SEQ ID NO: 38039 - protein, 46 aa, Artificial Sequence
  Quasi-synthetic sequence derived from human genome
RVQRRPWGAWLSARLWKWLKSPRSWRLGLALLLGGALLFWVLLHRR

SEQ ID NO: 38040 - protein, 46 aa, Artificial Sequence
  Quasi-synthetic sequence derived from human genome
LRKRIHRPRRRTTRRWKRWFKFRKRKGEKRPRPNHKAVARRAKLKF

SEQ ID NO: 38041 - protein, 46 aa, Artificial Sequence
  Quasi-synthetic sequence derived from human genome
VLKHARHFRGRKNRCYRLAVRTVIRAFVKCTKARYLKKKNMRTLWI

SEQ ID NO: 38042 - protein, 46 aa, Artificial Sequence
  Quasi-synthetic sequence derived from human genome
IRIQKTIRGWLLRKKYLRMRKAAITMQRYVRGYQARCYAKFLRRTK

SEQ ID NO: 38043 - protein, 46 aa, Artificial Sequence
  Quasi-synthetic sequence derived from human genome
KFLRVKRSAICIQSWWRGTLGRRKAAKRKWAAQTIRRLIRGFVLRH

SEQ ID NO: 38044 - protein, 46 aa, Artificial Sequence
  Quasi-synthetic sequence derived from human genome
RCLNKIMKTRVCRRLRRANRVLRARCRRAVKSNACYWAVLLLVFLN

SEQ ID NO: 38045 - protein, 46 aa, Artificial Sequence
  Quasi-synthetic sequence derived from human genome
KYPRGVGWRILKVLLWLLAILTGLIAGKFLFHQRLFGQLLRLKMFR

SEQ ID NO: 38046 - protein, 46 aa, Artificial Sequence
  Quasi-synthetic sequence derived from human genome
TWMRRMRILRRLLRRYRESKKIDRHMYHSLYLKVKGNVFKNKRILM

SEQ ID NO: 38047 - protein, 46 aa, Artificial Sequence
  Quasi-synthetic sequence derived from human genome
RFLKLKYYSIILQSRIRMIIAVTSYKRYLWATVTIQRHWRAYLRRK

SEQ ID NO: 38048 - protein, 46 aa, Artificial Sequence
  Quasi-synthetic sequence derived from human genome
RKKIHRRVLKKNPLKNLRIMLKLNPYAKTMRRNTILRQARNHKLRV

SEQ ID NO: 38049 - protein, 46 aa, Artificial Sequence
  Quasi-synthetic sequence derived from human genome
FLFLRRRCFLLTFYLWFLFFSRFLLMLFLPLLTSVVTFLPPLRARR

SEQ ID NO: 38050 - protein, 46 aa, Artificial Sequence
  Quasi-synthetic sequence derived from human genome
RARKNRSRIPLLRKRRFQLYRSMNSRARKNRSQIVLFQKRRFHFFC

SEQ ID NO: 38051 - protein, 46 aa, Artificial Sequence
  Quasi-synthetic sequence derived from human genome
RLGLLGRRGFSGRLGGYWKTWIFWKTWIFWKTWIFRKTYIGWKTWI

SEQ ID NO: 38052 - protein, 46 aa, Artificial Sequence
  Quasi-synthetic sequence derived from human genome
RLKNIRKVYGRCMWYRLRLLKPQPNIIPTVKKIVLLAGWALFLFLA

SEQ ID NO: 38053 - protein, 46 aa, Artificial Sequence
  Quasi-synthetic sequence derived from human genome
LKVLFKKTHRILRRLFNLCKRCHRQPRFRLPKERSLSYWWNRIQSL

SEQ ID NO: 38054 - protein, 46 aa, Artificial Sequence
  Quasi-synthetic sequence derived from human genome
KVLFKKTHRILRRLFNLCKRCHRQPRFRLPKERSLSYWWNRIQSLL

SEQ ID NO: 38055 - protein, 46 aa, Artificial Sequence
  Quasi-synthetic sequence derived from human genome
RARKNRSRIPLLRKRRFQLYRSTNPRARKNRSRIPLLRKHRFQLYR

SEQ ID NO: 38056 - protein, 46 aa, Artificial Sequence
  Quasi-synthetic sequence derived from human genome
RSKILTVRVILAPWKKGLIAVVIIGVIIALLIIAAKCYFLRKAKAK

SEQ ID NO: 38057 - protein, 46 aa, Artificial Sequence
  Quasi-synthetic sequence derived from human genome
IRLMLKYQKILWKVPSFLITQVRRMNEATMLLKKQLPSVRKLLRRK

SEQ ID NO: 38058 - protein, 46 aa, Artificial Sequence
  Quasi-synthetic sequence derived from human genome
LFRVIRLARIGRILRLIRGAKGIRTLLFALMMSLPALFNIGLLLFL

SEQ ID NO: 38059 - protein, 46 aa, Artificial Sequence
  Quasi-synthetic sequence derived from human genome
LFRVIRLARIGRILRLIKGAKGIRTLLFALMMSLPALFNIGLLLFL

SEQ ID NO: 38060 - protein, 46 aa, Artificial Sequence
  Quasi-synthetic sequence derived from human genome
YRTLDRRLRKNLRALVVVHATWYVKAFLALLRPFISSKFTRKIRFL

SEQ ID NO: 38061 - protein, 46 aa, Artificial Sequence
  Quasi-synthetic sequence derived from human genome
IVHPLRLRHLRRPRVARLLCLGVWALILVFAVPAARVHRPSRCRYR

SEQ ID NO: 38062 - protein, 46 aa, Artificial Sequence
  Quasi-synthetic sequence derived from human genome
IPLVRKRRFQLRRCMNPRARKNRSQIVLFQKRRFHFFCSMSCRAWV

SEQ ID NO: 38063 - protein, 46 aa, Artificial Sequence
  Quasi-synthetic sequence derived from human genome
IVAAMRRIRYEFKAKNIKKKKVSIMVSVDGVKVILKKKKKLLLLQK

SEQ ID NO: 38064 - protein, 46 aa, Artificial Sequence
  Quasi-synthetic sequence derived from human genome
WIIRTPILMTILINFLIFIRILGILLSKLRTRQMRCRDYRLRLARS

SEQ ID NO: 38065 - protein, 46 aa, Artificial Sequence
  Quasi-synthetic sequence derived from human genome
LGVLLRRVTRNLVRNKLAVITRLLQNLIMGLFLLFFVLRVRSNVLK

SEQ ID NO: 38066 - protein, 46 aa, Artificial Sequence
  Quasi-synthetic sequence derived from human genome
LALVGVLILFMFRRLRQFRQAQPTPQYRFRKRDKVMFYGRKIMRKV

SEQ ID NO: 38067 - protein, 46 aa, Artificial Sequence
  Quasi-synthetic sequence derived from human genome
PLIFLGCCFFSTLVLLLSIAIFQRQKRRKFWKAKNLQHIPLKKGKR

SEQ ID NO: 38068 - protein, 46 aa, Artificial Sequence
  Quasi-synthetic sequence derived from human genome
IKSLRVLRVLRPLKTIKRLPKLKAVFDCVVTSLKNVFNILIVYKLF

SEQ ID NO: 38069 - protein, 46 aa, Artificial Sequence
  Quasi-synthetic sequence derived from human genome
MLLFLSVPQPRPPGARTRAGAARVARWRRLRLQQLRRLRGLLRVLR

SEQ ID NO: 38070 - protein, 46 aa, Artificial Sequence
  Quasi-synthetic sequence derived from human genome
MPRLPVKKIRKQMKLLLLLLLLSCAAWLTYVHLGLVRQGRALRQRL

SEQ ID NO: 38071 - protein, 46 aa, Artificial Sequence
  Quasi-synthetic sequence derived from human genome
RVIRLARIGRILRLIRAAKGIRTLLFALMMSLPALFNIGLLLFLVM

SEQ ID NO: 38072 - protein, 46 aa, Artificial Sequence
  Quasi-synthetic sequence derived from human genome
LLRICRVLRSLKLLAQFRQIQIIILVLVRALKSMTFLLMLLLIFFY

SEQ ID NO: 38073 - protein, 46 aa, Artificial Sequence
  Quasi-synthetic sequence derived from human genome
RRIKLSPLMMYEKLSMIRFRYRILRSQHFRTKSKVCKLRKAQRSWV

SEQ ID NO: 38074 - protein, 46 aa, Artificial Sequence
  Quasi-synthetic sequence derived from human genome
RARKNRSRIPLLRKHRFQLYRSMNSRARKNRSQIVLFQKRRFHFFC

SEQ ID NO: 38075 - protein, 46 aa, Artificial Sequence
  Quasi-synthetic sequence derived from human genome
RIPLLRKRRFQLCRCMNPRARKNRSQIVLFQKLRFQFFCSMSCRAW

SEQ ID NO: 38076 - protein, 46 aa, Artificial Sequence
  Quasi-synthetic sequence derived from human genome
RIPLLRKRRFQLGRSMNLRARKNRSQIVLFQKRRFQFFCSMSGRAW

SEQ ID NO: 38077 - protein, 46 aa, Artificial Sequence
  Quasi-synthetic sequence derived from human genome
YLVASFLFVLMLLFFTILVLSYFRYMRIYRRYIYEPLHKPQRKRKK

SEQ ID NO: 38078 - protein, 46 aa, Artificial Sequence
  Quasi-synthetic sequence derived from human genome
RVIRLARIGRILRLIRGAKGIRTLLFALMMSLPALFNIGLLLFLVM

SEQ ID NO: 38079 - protein, 46 aa, Artificial Sequence
  Quasi-synthetic sequence derived from human genome
FVVYSSIVSFYVPFIVTLLVYIKIYIVLRRRRKRVNTKRSSRAFRA

SEQ ID NO: 38080 - protein, 46 aa, Artificial Sequence
  Quasi-synthetic sequence derived from human genome
KKIWWIIRGPMMLCVTVNFFIFLKILKLLISKLKAHQMCFRDYKYR

SEQ ID NO: 38081 - protein, 46 aa, Artificial Sequence
  Quasi-synthetic sequence derived from human genome
CKTMKFIVWRRFKWVIIGLLFLLILLLFVAVLLYSLPNYLSMKIVK

SEQ ID NO: 38082 - protein, 46 aa, Artificial Sequence
  Quasi-synthetic sequence derived from human genome
LRPLVKPKIVKKRTKKFIRHQSDRYVKIKRNWRKPRGIDNRVRRRF

SEQ ID NO: 38083 - protein, 46 aa, Artificial Sequence
  Quasi-synthetic sequence derived from human genome
REKAARIIQLAVINFLAKQRLRKRVNAALVIQKYWRRVLAQRKLLM

SEQ ID NO: 38084 - protein, 46 aa, Artificial Sequence
  Quasi-synthetic sequence derived from human genome
VFIQAWWRGMLVRRTLLHAALRAWIIQCWWRQVLEKLLAKRRRMVL

SEQ ID NO: 38085 - protein, 46 aa, Artificial Sequence
  Quasi-synthetic sequence derived from human genome
FKLFTLVSACIPVFRLARRRKKILFYCHFPDLLLTKRDSFLKRLYR

SEQ ID NO: 38086 - protein, 46 aa, Artificial Sequence
  Quasi-synthetic sequence derived from human genome
YLRLLVKLYRFLARRTNSTFNQVVLKRLFMSRTNRPPLSLSRMIRK

SEQ ID NO: 38087 - protein, 46 aa, Artificial Sequence
  Quasi-synthetic sequence derived from human genome
LFLCGLLSKAKQKLLRHLVPAAALRRKRKALWAHLFSSLRGYLKSL

SEQ ID NO: 38088 - protein, 46 aa, Artificial Sequence
  Quasi-synthetic sequence derived from human genome
FFLIAVRLASLNQILDPWVYLLLRKILLRKFCQMRKRRLREQFWRP

SEQ ID NO: 38089 - protein, 46 aa, Artificial Sequence
  Quasi-synthetic sequence derived from human genome
RLLFAKLFGHLTSARRARKSEVPHFRLKKVQNIKMWLSLRSYLKRR

SEQ ID NO: 38090 - protein, 46 aa, Artificial Sequence
  Quasi-synthetic sequence derived from human genome
KYISKYSVFLRHRYQSRSAFLGRYLKKKKSVVSRLKKAKRTAKVLL

SEQ ID NO: 38091 - protein, 46 aa, Artificial Sequence
  Quasi-synthetic sequence derived from human genome
WLNNLAEKAKRCNRRLKSQILLKKYLMKRRWKKNFIAVSAANRFKK

SEQ ID NO: 38092 - protein, 46 aa, Artificial Sequence
  Quasi-synthetic sequence derived from human genome
QGRLRELRIRCVARKFLYLWIRMTFGRVFPSKARFYYEQRLLRKVF

SEQ ID NO: 38093 - protein, 46 aa, Artificial Sequence
  Quasi-synthetic sequence derived from human genome
IVPFAIIGLCYSLIVRVLVRAHRHRGLRPRRQKALRMILAVVLVFF

SEQ ID NO: 38094 - protein, 46 aa, Artificial Sequence
  Quasi-synthetic sequence derived from human genome
KMNHHKYRKLVKKTRFLRRKVQEGRLRRKQIKFEKDLRRIWLKAGL

SEQ ID NO: 38095 - protein, 46 aa, Artificial Sequence
  Quasi-synthetic sequence derived from human genome
KSWRRRSCWRKWKQLSRLQRNMILFLLAFLLFCGLLFYINLADHWK

SEQ ID NO: 38096 - protein, 46 aa, Artificial Sequence
  Quasi-synthetic sequence derived from human genome
KLLKRLRLLPALLILRAFKPHRKIRDYRVVVVGTAGVGKSTLLHKW

SEQ ID NO: 38097 - protein, 46 aa, Artificial Sequence
  Quasi-synthetic sequence derived from human genome
LRKYIYIRSCVVIIQKRFRCFQAQKLYKRRKESILTIQKYYKAYLK

SEQ ID NO: 38098 - protein, 46 aa, Artificial Sequence
  Quasi-synthetic sequence derived from human genome
KLFMRMASKQLRENVLVKRKRTKGKKLLLSIGVLLHKWKNVCIVLT

SEQ ID NO: 38099 - protein, 46 aa, Artificial Sequence
  Quasi-synthetic sequence derived from human genome
MRRLRRLAHLVLFCPFSKRLQGRLPGLRVRCIFLAWLGVFAGSWLV

SEQ ID NO: 38100 - protein, 46 aa, Artificial Sequence
  Quasi-synthetic sequence derived from human genome
KTWIFWKTWIFRKTYIGWKTWIFSGRCGLTGRPGFGGRRRFFWKTL

SEQ ID NO: 38101 - protein, 46 aa, Artificial Sequence
  Quasi-synthetic sequence derived from human genome
RFLFAKLFSHITSARKARKYEIPHFRLKKVENIKIWLSLRSYLKRR

SEQ ID NO: 38102 - protein, 46 aa, Artificial Sequence
  Quasi-synthetic sequence derived from human genome
IARKLQKNLKTGSFLNRLGKLLLHLFMVLCLTLFLNNIIKKILNLK

SEQ ID NO: 38103 - protein, 46 aa, Artificial Sequence
  Quasi-synthetic sequence derived from human genome
WLARLLRSRAGSRKRPLTLLQRAGLLLLLGLLGFLALLALMSRLGR

SEQ ID NO: 38104 - protein, 46 aa, Artificial Sequence
  Quasi-synthetic sequence derived from human genome
KTVKKKIKPTLPLRIFINVSRFFCVQLKKMVRLMYINSFISFPLNI

SEQ ID NO: 38105 - protein, 46 aa, Artificial Sequence
  Quasi-synthetic sequence derived from human genome
KQKECNFFLIAVRLASLNQILDPWVYLLLRKILLRKFCQMRKRRLR

SEQ ID NO: 38106 - protein, 46 aa, Artificial Sequence
  Quasi-synthetic sequence derived from human genome
RSWCLCKLLRFFYSLFFPGLIVCGTLCVCLVIVLWGIRLLLQRKKK

SEQ ID NO: 38107 - protein, 46 aa, Artificial Sequence
  Quasi-synthetic sequence derived from human genome
NVPVFWPILVMYFIMLFCITMKRQIKHMIKYRYIPFTHGKRRYRGK

SEQ ID NO: 38108 - protein, 46 aa, Artificial Sequence
  Quasi-synthetic sequence derived from human genome
YRLARQRIIQFQARCRAYLVRKAFRHRLWAVLTVQAYARGMIARRL

SEQ ID NO: 38109 - protein, 46 aa, Artificial Sequence
  Quasi-synthetic sequence derived from human genome
RVRFLNLKKTIIKFQAHVRKHQQRQKYKKMKKAAVIIQTHFRAYIF

SEQ ID NO: 38110 - protein, 46 aa, Artificial Sequence
  Quasi-synthetic sequence derived from human genome
LTNPRSLKHLCRLKIRKCMGRLHLRCPVFMSFLPLPNRLKAYVLYK

SEQ ID NO: 38111 - protein, 46 aa, Artificial Sequence
  Quasi-synthetic sequence derived from human genome
KQRLKRLRNIHYLFNTALFLIAWRLLIARSQMARNVWFFIVSFCYK

SEQ ID NO: 38112 - protein, 46 aa, Artificial Sequence
  Quasi-synthetic sequence derived from human genome
YAEQMNVRMPFRRKIYYLPRRYKFMSRIDKQISRFRRWLPKKPMRL

SEQ ID NO: 38113 - protein, 46 aa, Artificial Sequence
  Quasi-synthetic sequence derived from human genome
KEKLGLLLLTFLGIVAAVLVKKYQAVLRRKALLIFLVVHRLRWSSK

SEQ ID NO: 38114 - protein, 46 aa, Artificial Sequence
  Quasi-synthetic sequence derived from human genome
AFVRGYLVRKQMRLQRKAVISLQSYFRMRKARQYYLKMYKAIIVIQ

SEQ ID NO: 38115 - protein, 46 aa, Artificial Sequence
  Quasi-synthetic sequence derived from human genome
WRRVLAQRKLLMLKKEKLEKVQNKAASLIQAMWRRYRAKKYLCKVK

SEQ ID NO: 38116 - protein, 46 aa, Artificial Sequence
  Quasi-synthetic sequence derived from human genome
RQRRQKLLLAQLHHRKRVKAAGQIQAWWRGVLVRRTLLVAALRAWM

SEQ ID NO: 38117 - protein, 46 aa, Artificial Sequence
  Quasi-synthetic sequence derived from human genome
MSLKLTCSAFRLQRALRFLLGRLPWRVASGARRFRRWLNRYSYTVL

SEQ ID NO: 38118 - protein, 46 aa, Artificial Sequence
  Quasi-synthetic sequence derived from human genome
SKSKFSRYWRRWNRFCRRKCRAAVKSNVFYWLVIFLVFLNTLTIAS

SEQ ID NO: 38119 - protein, 46 aa, Artificial Sequence
  Quasi-synthetic sequence derived from human genome
RIIWHKFKQWVIPWHLNKRYNRKRFFALPYVDHFLRLEREKRARIK

SEQ ID NO: 38120 - protein, 46 aa, Artificial Sequence
  Quasi-synthetic sequence derived from human genome
RISILLRDLPTLKAAVIVAFAFTTLLIACLLLRVFRSGKRLKKTRK

SEQ ID NO: 38121 - protein, 46 aa, Artificial Sequence
  Quasi-synthetic sequence derived from human genome
LIQAMWRRYRAKKYLCKVKAACKIQAWYRCWRAHKEYLAILKAVKI

SEQ ID NO: 38122 - protein, 46 aa, Artificial Sequence
  Quasi-synthetic sequence derived from human genome
RKQIKRKAPRGFLKRVFKRKKPQLRLEKSGDLLVHLNCLLFVHRLA

SEQ ID NO: 38123 - protein, 46 aa, Artificial Sequence
  Quasi-synthetic sequence derived from human genome
IKSLRVLRVLRPLKTIKRLPKLKAVFDCVVNSLKNVFNILIVYMLF

SEQ ID NO: 38124 - protein, 46 aa, Artificial Sequence
  Quasi-synthetic sequence derived from human genome
IKSLRVLRVLRPLKTIKRLPKLKAVFDCVVNSLKNVLNILIVYMLF

SEQ ID NO: 38125 - protein, 46 aa, Artificial Sequence
  Quasi-synthetic sequence derived from human genome
RRCKKRMFKFHQMKHIFEILDKMRCLRKRSTVSFLGVLVIFLLFMN

SEQ ID NO: 38126 - protein, 46 aa, Artificial Sequence
  Quasi-synthetic sequence derived from human genome
LWRRQIYAVATLRFLKLRRERRALLCLLLVLGIAFIPIILEKIMYK

SEQ ID NO: 38127 - protein, 46 aa, Artificial Sequence
  Quasi-synthetic sequence derived from human genome
RGFLARRRYRKMLEEHKAVILQKYARAWLARRRFQSIRRFVLNIQL

SEQ ID NO: 38128 - protein, 46 aa, Artificial Sequence
  Quasi-synthetic sequence derived from human genome
LLVKLRLCFLVMAYGTTIFHPLLYAFTRQKFQKVLKSKMKKRVVSI

SEQ ID NO: 38129 - protein, 46 aa, Artificial Sequence
  Quasi-synthetic sequence derived from human genome
RKRRKMSKKLPPVIIKYIIINRFRGRKNMLVKLGKIDSKEKQVILT

SEQ ID NO: 38130 - protein, 46 aa, Artificial Sequence
  Quasi-synthetic sequence derived from human genome
LFYLRGDRGQILVICLIAVMVVFIILVIGVCTCCHPLRKRRKRKKK

SEQ ID NO: 38131 - protein, 46 aa, Artificial Sequence
  Quasi-synthetic sequence derived from human genome
HMKVFHKYSNRNKVRHTKKKTFKCIKCSKSFFMLSCLIRHKRIHIR

SEQ ID NO: 38132 - protein, 46 aa, Artificial Sequence
  Quasi-synthetic sequence derived from human genome
FILVVMFWLIFLLIILSYIKIGKNLLRISKRRSKFPNSGKYATTAR

SEQ ID NO: 38133 - protein, 46 aa, Artificial Sequence
  Quasi-synthetic sequence derived from human genome
YLRGFLARNRYRKILREHKAVIIQKRVRGWLARTHYKRSMHAIIYL

SEQ ID NO: 38134 - protein, 46 aa, Artificial Sequence
  Quasi-synthetic sequence derived from human genome
ITLGLLVAGVLVLLVSLGVAIHLCCRRRRARLRFMKQKFNIVCLKI

SEQ ID NO: 38135 - protein, 46 aa, Artificial Sequence
  Quasi-synthetic sequence derived from human genome
RCRGRKRCIKKFSIQRFPKILVLHLKRFSESRIRTSKLTTFVNFPL

SEQ ID NO: 38136 - protein, 46 aa, Artificial Sequence
  Quasi-synthetic sequence derived from human genome
YWLIISCSIAYVALVTLLIWVPVKVILHKKRYIYRKIKGWRPVLMM

SEQ ID NO: 38137 - protein, 46 aa, Artificial Sequence
  Quasi-synthetic sequence derived from human genome
RRRCCRLCIWLLQTLVHLLQLGQVWRYLRALYLGLQSRWRGERLRR

SEQ ID NO: 38138 - protein, 46 aa, Artificial Sequence
  Quasi-synthetic sequence derived from human genome
KFLSLANKRLPVKRAAVQFLNNAWGIQKKQNAKRFKRRWMVRKMKT

SEQ ID NO: 38139 - protein, 46 aa, Artificial Sequence
  Quasi-synthetic sequence derived from human genome
TLKKKRRNFAELKIKRLRKKFAQKMLRKARRKLIYEKAKHYHKEYR

SEQ ID NO: 38140 - protein, 46 aa, Artificial Sequence
  Quasi-synthetic sequence derived from human genome
LLMSLFLFFFVLFLCLFFYNCYKGYLPRQCLKFRSALLIGKKKPKS

SEQ ID NO: 38141 - protein, 46 aa, Artificial Sequence
  Quasi-synthetic sequence derived from human genome
LWHWLLRTGGWKVSAVTLAYLIFCLCSLVGILHLQRALVLRRKRKR

SEQ ID NO: 38142 - protein, 46 aa, Artificial Sequence
  Quasi-synthetic sequence derived from human genome
VLRALRLLRIFKVTKYWASLRNLVVSLLNSMKSIISLLFLLFLFIV

SEQ ID NO: 38143 - protein, 46 aa, Artificial Sequence
  Quasi-synthetic sequence derived from human genome
RKKKKKFCYLCILLLIVLFILLCCLYRLCKKSKPIKKQQDVQTPSA

SEQ ID NO: 38144 - protein, 46 aa, Artificial Sequence
  Quasi-synthetic sequence derived from human genome
VLRALRLLRIFKITKYWASLRNLVVSLMSSMKSIISLLFLLFLFIV

SEQ ID NO: 38145 - protein, 46 aa, Artificial Sequence
  Quasi-synthetic sequence derived from human genome
FALVQPFRLTRWRTRYKTIRINLGLWAASFILALPVWVYSKVIKFK

SEQ ID NO: 38146 - protein, 46 aa, Artificial Sequence
  Quasi-synthetic sequence derived from human genome
FVKGLIQGAIYAGIVIALLFLCLLPLIVKHIRKKQAKKAAAIRAKK

SEQ ID NO: 38147 - protein, 46 aa, Artificial Sequence
  Quasi-synthetic sequence derived from human genome
RPIGKAKPKKQSKKKVPFWNVQNKIILFTVFLFILAVIAWTLLWLY

SEQ ID NO: 38148 - protein, 46 aa, Artificial Sequence
  Quasi-synthetic sequence derived from human genome
IKHLRKSLKIIYLNSIQQLEIRNMSWPRLIRKLRCYLKEMKNLRKL

SEQ ID NO: 38149 - protein, 46 aa, Artificial Sequence
  Quasi-synthetic sequence derived from human genome
FPRRPRIHFRFPNRPFVPSRCNHRFPFQPFYWPHRYLTYRYFPRRR

SEQ ID NO: 38150 - protein, 46 aa, Artificial Sequence
  Quasi-synthetic sequence derived from human genome
KKIDVIRRKVSKIQRFHARSLWTNHKRYGYKKHSYRLVKKLKLQKM

SEQ ID NO: 38151 - protein, 46 aa, Artificial Sequence
  Quasi-synthetic sequence derived from human genome
RYLRVKLTVRYKRVTTHRRIWLALGLCWLVSFLVGLTPMFGWNMKL

SEQ ID NO: 38152 - protein, 46 aa, Artificial Sequence
  Quasi-synthetic sequence derived from human genome
LRWVRLLGFAIVYGTIILKLYRVLQLFLSRTAQRSALLSSGRLLRR

SEQ ID NO: 38153 - protein, 46 aa, Artificial Sequence
  Quasi-synthetic sequence derived from human genome
FRTLMMRRRFLSLKKTAILIQRKYRAHLCTKHHLQFLQVQNAVIKI

SEQ ID NO: 38154 - protein, 46 aa, Artificial Sequence
  Quasi-synthetic sequence derived from human genome
VVVTAVLILLVVRRLRVPKTPAPDGPRYRFRKRDKVLFYGRKIMRK

SEQ ID NO: 38155 - protein, 46 aa, Artificial Sequence
  Quasi-synthetic sequence derived from human genome
IPKRKRKAKKRRKNDVVVVKGKLKLCSISGLIALCGILVLLVGIAM

SEQ ID NO: 38156 - protein, 46 aa, Artificial Sequence
  Quasi-synthetic sequence derived from human genome
TKIQAWWRGTLVRRALLHAALSACIIQCWWRLILSKILKKRRQAAL

SEQ ID NO: 38157 - protein, 46 aa, Artificial Sequence
  Quasi-synthetic sequence derived from human genome
ILRVIRLVRVFRIFKLSRHSKGLQILGQTLRASMRELGLLIFFLFI

SEQ ID NO: 38158 - protein, 46 aa, Artificial Sequence
  Quasi-synthetic sequence derived from human genome
FLRLFRAARLIKLLRQGYTIRILLWTFVQSFKALPYVCLLIAMLFF

SEQ ID NO: 38159 - protein, 46 aa, Artificial Sequence
  Quasi-synthetic sequence derived from human genome
HKTFRIKRFLAKKQKQNRPIPQWIRMKTGNKIRYNSKRRHWRRTKL

SEQ ID NO: 38160 - protein, 46 aa, Artificial Sequence
  Quasi-synthetic sequence derived from human genome
IFPRLARHDRGNYVRLNMKQKHYVRGRALRSRLLRKQAWKQKWRKK

SEQ ID NO: 38161 - protein, 46 aa, Artificial Sequence
  Quasi-synthetic sequence derived from human genome
VLRALRLLRIFKVTKYWSSLRNLVVSLLNSMKSIISLLFLLFLFIV

SEQ ID NO: 38162 - protein, 46 aa, Artificial Sequence
  Quasi-synthetic sequence derived from human genome
RAGLVLRLLRALRVLYVMRLARHSLGLRSLGLTMRRCAREFGLLLL

SEQ ID NO: 38163 - protein, 46 aa, Artificial Sequence
  Quasi-synthetic sequence derived from human genome
PLKSARYFLWHTYRWLLLKLLLLLLLLLLLALFLYSVPGYLVKKIL

SEQ ID NO: 38164 - protein, 46 aa, Artificial Sequence
  Quasi-synthetic sequence derived from human genome
AHKRMKVKKLPMILALHLKRFKYMDQLHRYTKLSYRVVFPLELRLF

SEQ ID NO: 38165 - protein, 46 aa, Artificial Sequence
  Quasi-synthetic sequence derived from human genome
FAGKLLSVFRQPLSSLWRSLVPLFCWLRATFWLLATKRRKQQLVLR

SEQ ID NO: 38166 - protein, 46 aa, Artificial Sequence
  Quasi-synthetic sequence derived from human genome
RPLLLQKLLKDGGVLSPILTRLMNFFVFSRGLLQYINQRKKFRRRW

SEQ ID NO: 38167 - protein, 46 aa, Artificial Sequence
  Quasi-synthetic sequence derived from human genome
RLFRIKCVTRIQAYWRGCVVRKWYRNLRKTVPPTDAKLRKKFFEKK

SEQ ID NO: 38168 - protein, 46 aa, Artificial Sequence
  Quasi-synthetic sequence derived from human genome
IAGSVALFLSVLVILLVIYVSWKRYPASMKQLQQRSLMRRHRKKKR

SEQ ID NO: 38169 - protein, 46 aa, Artificial Sequence
  Quasi-synthetic sequence derived from human genome
FFIVPSHRRKIFPGLILSDIKPAKRMKFKTVCYLLVQLMHCRKMFK

SEQ ID NO: 38170 - protein, 46 aa, Artificial Sequence
  Quasi-synthetic sequence derived from human genome
MVVVMKFFRWVRRAWQRIISWVFFWRQKIKPTISGHPDSKKHSLKK

SEQ ID NO: 38171 - protein, 46 aa, Artificial Sequence
  Quasi-synthetic sequence derived from human genome
ILRVIRLVRVFRIFKLSRHSKGLQILGQTLKASMRELGLLIFFLFI

SEQ ID NO: 38172 - protein, 46 aa, Artificial Sequence
  Quasi-synthetic sequence derived from human genome
FLKLFRAARLIKLLRQGYTIRILLWTFVQSFKALPYVCLLIAMLFF

SEQ ID NO: 38173 - protein, 46 aa, Artificial Sequence
  Quasi-synthetic sequence derived from human genome
FKLLILLIGTWALFFRKRRADMPRVFVFRALLLVLIFLFVVSYWLF

SEQ ID NO: 38174 - protein, 46 aa, Artificial Sequence
  Quasi-synthetic sequence derived from human genome
TFTLFKCLLLTGGCTLLHCFVILPVFLTFFPPSKKHHKKKKRAKRK

SEQ ID NO: 38175 - protein, 46 aa, Artificial Sequence
  Quasi-synthetic sequence derived from human genome
IKAGKAFLRLKRKFIQMRRPFLERRDLIIQHIPGFWVKAFLNHPRI

SEQ ID NO: 38176 - protein, 46 aa, Artificial Sequence
  Quasi-synthetic sequence derived from human genome
LRALRFLSVISIVDPWIFIIFRSPVFRIFFHKIFIRPLRYRSRCSN

SEQ ID NO: 38177 - protein, 46 aa, Artificial Sequence
  Quasi-synthetic sequence derived from human genome
WRRRHWAVKMVTCFIIGLLFPVFSVCYLIAPKSPLGLFIRKPFIKF

SEQ ID NO: 38178 - protein, 46 aa, Artificial Sequence
  Quasi-synthetic sequence derived from human genome
WRHFHTLRMTIFCLVLPLLVMAICYTGIIKTLLRCPSKKKYKAIRL

SEQ ID NO: 38179 - protein, 46 aa, Artificial Sequence
  Quasi-synthetic sequence derived from human genome
KLKNKIKYRAEACIKMQKTIRMWLCKRRHKPRIDGLVKVGTLKKRL

SEQ ID NO: 38180 - protein, 46 aa, Artificial Sequence
  Quasi-synthetic sequence derived from human genome
FLPKCIRAKIQDYHILTRKRIRYRFRRFIQQFSQCKATARNLKLKY

SEQ ID NO: 38181 - protein, 46 aa, Artificial Sequence
  Quasi-synthetic sequence derived from human genome
SRRMIDYRHFVPQMPFVPAVAKSIPRKRISLKRPKKCFRNLFHIRR

SEQ ID NO: 38182 - protein, 46 aa, Artificial Sequence
  Quasi-synthetic sequence derived from human genome
ARKVYIQTRRQRKLHFVVGGFAYLLPKTAVVLRCPARRVRKPLITW

SEQ ID NO: 38183 - protein, 46 aa, Artificial Sequence
  Quasi-synthetic sequence derived from human genome
AQKRMRVKKLPMILALHLKRFKYMEQLHRYTKLSYRVVFPLELRLF

SEQ ID NO: 38184 - protein, 46 aa, Artificial Sequence
  Quasi-synthetic sequence derived from human genome
ILKRALKVKQAMLQLYVLKLLKLQTKYLGRQWRKSNMKTMSAIYQK

SEQ ID NO: 38185 - protein, 46 aa, Artificial Sequence
  Quasi-synthetic sequence derived from human genome
FSLFRKWKAFSVWRKNVRSKKITGCQKSLQKNLFIVNPHLRPALLK

SEQ ID NO: 38186 - protein, 46 aa, Artificial Sequence
  Quasi-synthetic sequence derived from human genome
PLKSIKYLICTRYKWLIIKIVLALLGLLMLGLFLYSLPGYMVKKLL

SEQ ID NO: 38187 - protein, 46 aa, Artificial Sequence
  Quasi-synthetic sequence derived from human genome
LKKCYQMIDRRLRKNLKSLIIVHPSWFIRTVLAISRPFISVKFINK

SEQ ID NO: 38188 - protein, 46 aa, Artificial Sequence
  Quasi-synthetic sequence derived from human genome
NSRGMLPVAVLVALLAVIVLVALLLLWRRRQKRRTGALVLSRGGKR

SEQ ID NO: 38189 - protein, 46 aa, Artificial Sequence
  Quasi-synthetic sequence derived from human genome
ALFVYLNRKIVQVMRKQKTINRFLMRKRLLFPALVTLLISTLTFPP

SEQ ID NO: 38190 - protein, 46 aa, Artificial Sequence
  Quasi-synthetic sequence derived from human genome
AHLKRLVKLHIKRHYHKKFWKLGAVIFFFIIVLVLMQREVSVQYSK

SEQ ID NO: 38191 - protein, 46 aa, Artificial Sequence
  Quasi-synthetic sequence derived from human genome
KGKKPSFMVIRFPGRRGYGRLRPRARSLSKASTAINWLTKKFLLKK

SEQ ID NO: 38192 - protein, 46 aa, Artificial Sequence
  Quasi-synthetic sequence derived from human genome
RRPDTSFLWFTSPYKTMKFILWRRFRWAIILFIILFILLLFLAIFI

SEQ ID NO: 38193 - protein, 46 aa, Artificial Sequence
  Quasi-synthetic sequence derived from human genome
RRYIENIYHSKPMRWPFFLFIPFFIIFCVLIAIMVKVNFQRKKWRT

SEQ ID NO: 38194 - protein, 46 aa, Artificial Sequence
  Quasi-synthetic sequence derived from human genome
LLVPLLVLALASYRRLCLRLRLADCLVPYSRALYRRRRAPQPRQIR

SEQ ID NO: 38195 - protein, 46 aa, Artificial Sequence
  Quasi-synthetic sequence derived from human genome
RRRPARTLGLLLLVVLGFLVLRRLDWSTLVPLRLRHRQLGLQAKGW

SEQ ID NO: 38196 - protein, 46 aa, Artificial Sequence
  Quasi-synthetic sequence derived from human genome
LRRAIVFTRQLVTYIVVGVTLRPAILVIPCLLLIKCHLKLYRTKLI

SEQ ID NO: 38197 - protein, 46 aa, Artificial Sequence
  Quasi-synthetic sequence derived from human genome
RLRPRLHFCLVLLLLLVVPAAWGCGPGRVVGSRRRPPRKLVPLAYK

SEQ ID NO: 38198 - protein, 46 aa, Artificial Sequence
  Quasi-synthetic sequence derived from human genome
APGPKAALAVIRGGATRAAGVFYPWRFRLLCLLRRWLPRPRAWFIR

SEQ ID NO: 38199 - protein, 46 aa, Artificial Sequence
  Quasi-synthetic sequence derived from human genome
LKAKKAQLMQYLSLPKTPKMLKMSKGLDARSKRWLKIIWRRHGIWP

SEQ ID NO: 38200 - protein, 46 aa, Artificial Sequence
  Quasi-synthetic sequence derived from human genome
YLARKAFAKKQQQLSALKVLQRNCAAYLKLRHWQWWRVFTKVKPLL

SEQ ID NO: 38201 - protein, 46 aa, Artificial Sequence
  Quasi-synthetic sequence derived from human genome
EVLRRIILLQRWFRVLLCRQHFLHLRQASVIIQRFWRNYLNQKQVR

SEQ ID NO: 38202 - protein, 46 aa, Artificial Sequence
  Quasi-synthetic sequence derived from human genome
FVIRIRGINGVSPKVRKVLQLLRLRQIFNGTFVKLNKASINMLRIV

SEQ ID NO: 38203 - protein, 46 aa, Artificial Sequence
  Quasi-synthetic sequence derived from human genome
WRRKHWVVKLLTCMTIGFLFPMLSIAYLISPRSNLGLFIKKPFIKF

SEQ ID NO: 38204 - protein, 46 aa, Artificial Sequence
  Quasi-synthetic sequence derived from human genome
ALRIQFFLQMAVYRRRFVQQKRAAITLQHYFRTWQTRKQFLLYRKA

SEQ ID NO: 38205 - protein, 46 aa, Artificial Sequence
  Quasi-synthetic sequence derived from human genome
CVVLTFLGHRLLKRLLGPKLRRFLKPQGHPRLLLWFKRDPRPWSKE

SEQ ID NO: 38206 - protein, 46 aa, Artificial Sequence
  Quasi-synthetic sequence derived from human genome
WKPSPLIKPFGARKKRSWYLTWKYKLTNQRALRRFCQTGAVLFLLV

SEQ ID NO: 38207 - protein, 46 aa, Artificial Sequence
  Quasi-synthetic sequence derived from human genome
IRILAVITIQAGVRGYLARRRIRLWHRGAMVIQATWRGYRVRRNLA

SEQ ID NO: 38208 - protein, 46 aa, Artificial Sequence
  Quasi-synthetic sequence derived from human genome
LLLVVVTWRVCQKSHCFRLGRQLSKALQVNCVVRKLLVQLRRLYWW

SEQ ID NO: 38209 - protein, 46 aa, Artificial Sequence
  Quasi-synthetic sequence derived from human genome
LSIASLIFSAILKSLQSYFSPTLFRVIRLARIGRILRLIRAAKGIR

SEQ ID NO: 38210 - protein, 46 aa, Artificial Sequence
  Quasi-synthetic sequence derived from human genome
RRGRRRTRAAGSLLSRAAILLFISAFLVRVPSSVGHLVRLPRAFRL

SEQ ID NO: 38211 - protein, 46 aa, Artificial Sequence
  Quasi-synthetic sequence derived from human genome
LSMIAHLGVFPSKAERKITSRPFTRFRTAVRVVIAILRLRFLVKKW

SEQ ID NO: 38212 - protein, 46 aa, Artificial Sequence
  Quasi-synthetic sequence derived from human genome
KKAVWHKLLSKQRKRAVVACFRMAPLYNLPRHRSINLFLHGYQRFW

SEQ ID NO: 38213 - protein, 46 aa, Artificial Sequence
  Quasi-synthetic sequence derived from human genome
RFQQFLFAFFIFIMSLLLISGQRPVNLTMRRKLRKHNCLQRRCMPL

SEQ ID NO: 38214 - protein, 46 aa, Artificial Sequence
  Quasi-synthetic sequence derived from human genome
YLARKAFAKRQQQLTAMKVLQRNCAAYLKLRNWQWWRLFTKVKPLL

SEQ ID NO: 38215 - protein, 46 aa, Artificial Sequence
  Quasi-synthetic sequence derived from human genome
VAHMGVLVLRGNTKINTFNWAKIRKLSFKRKHFLIKLHANILVLCK

SEQ ID NO: 38216 - protein, 46 aa, Artificial Sequence
  Quasi-synthetic sequence derived from human genome
WRRVLAQRKLLMLKKEKLEKVQNKAASLIQGYWRRYSTRQRFLKLK

SEQ ID NO: 38217 - protein, 46 aa, Artificial Sequence
  Quasi-synthetic sequence derived from human genome
MARRASRGPIAFWARRASRTRLAAWARRALLSLRSPKARRGKARRR

SEQ ID NO: 38218 - protein, 46 aa, Artificial Sequence
  Quasi-synthetic sequence derived from human genome
FRLVQASGQKAPRPAARRKARRLLKTVLMILLAFLVCWGPLFGLLL

SEQ ID NO: 38219 - protein, 46 aa, Artificial Sequence
  Quasi-synthetic sequence derived from human genome
RIHLKLHFTCQRILFLKPSCMLEVITWPIQAFVKRKVIIFLKKCLL

SEQ ID NO: 38220 - protein, 46 aa, Artificial Sequence
  Quasi-synthetic sequence derived from human genome
RKAPLWLRAKFQRLLFKLGCYIQKNCGKFLVVGLLIFGAFAVGLKA

SEQ ID NO: 38221 - protein, 46 aa, Artificial Sequence
  Quasi-synthetic sequence derived from human genome
KGKRCIVLVTELMTSGTLKTYLKRFKVMKPKVLRSWCRQILKGLLF

SEQ ID NO: 38222 - protein, 46 aa, Artificial Sequence
  Quasi-synthetic sequence derived from human genome
KRRMSVGQQTWALLCKNCLKKWRMKRQTLLEWLFSFLLVLFLYLFF

SEQ ID NO: 38223 - protein, 46 aa, Artificial Sequence
  Quasi-synthetic sequence derived from human genome
PLIAITRNPVFPRFIKIIEVKNKKLVELLRRKVRLAQPYVGVFLKR

SEQ ID NO: 38224 - protein, 46 aa, Artificial Sequence
  Quasi-synthetic sequence derived from human genome
RRTLRKPKRVPSIYKLKLRPRIRPRRDHRPEKQPSRIPRPLAYVFL

SEQ ID NO: 38225 - protein, 46 aa, Artificial Sequence
  Quasi-synthetic sequence derived from human genome
RVFVEGWTHLVRLLRLIILIRIFHLLHQKRQLEKLMRRLVSENKRR

SEQ ID NO: 38226 - protein, 46 aa, Artificial Sequence
  Quasi-synthetic sequence derived from human genome
RRKMPSLGWLRKCYQQIDRRLRKNLKSLIIVHPSWFIRTLLAVTRP

SEQ ID NO: 38227 - protein, 46 aa, Artificial Sequence
  Quasi-synthetic sequence derived from human genome
ILRTLFRSRSKRRHRTVKLIFAIVVAYFLSWGPYNFTLFLQTLFRT

SEQ ID NO: 38228 - protein, 46 aa, Artificial Sequence
  Quasi-synthetic sequence derived from human genome
YLARKAFAKRQQQLTAMKVIQRNCAAYLKLRNWQWWRLFTKVKPLL

SEQ ID NO: 38229 - protein, 46 aa, Artificial Sequence
  Quasi-synthetic sequence derived from human genome
RKNTLARRKGRHMGIGKRKGTANARMPEKVTWMRRMRILRRLLRRY

SEQ ID NO: 38230 - protein, 46 aa, Artificial Sequence
  Quasi-synthetic sequence derived from human genome
KLVFLPLRLVWKEVILRKILILVLVQKDVSLTTQYFLQKARSRRHR

SEQ ID NO: 38231 - protein, 46 aa, Artificial Sequence
  Quasi-synthetic sequence derived from human genome
FKCLYYLIWKNYKKYIIIAFILIILIIFLVLFIYTLPGAISRRIVV

SEQ ID NO: 38232 - protein, 46 aa, Artificial Sequence
  Quasi-synthetic sequence derived from human genome
FQRALALFVITCLVIFVLVHSFLKKLLGKKLTRCLKPFENSRLRLW

SEQ ID NO: 38233 - protein, 46 aa, Artificial Sequence
  Quasi-synthetic sequence derived from human genome
LVSPKWKNFKGLKLLCRDKIRLNNAIWRAWYIQYVKRRKSPVCGFV

SEQ ID NO: 38234 - protein, 46 aa, Artificial Sequence
  Quasi-synthetic sequence derived from human genome
FPARWSFRAYTSVLYFNPWMRIFIQAKRVKTKHLCYCLYRPRKYLY

SEQ ID NO: 38235 - protein, 46 aa, Artificial Sequence
  Quasi-synthetic sequence derived from human genome
MLYRFLARRTNSTFNQVVLKRLFMSRTNRPPLSLSRMIRKMKLPGR

SEQ ID NO: 38236 - protein, 46 aa, Artificial Sequence
  Quasi-synthetic sequence derived from human genome
RIIFPFGFKFNIAVGLILCISLVILTFQWRFYLSFRKLMRWILILV

SEQ ID NO: 38237 - protein, 46 aa, Artificial Sequence
  Quasi-synthetic sequence derived from human genome
KVLCERGNSLMNNRTGRRKSWRLEFLFLRRRCFLLTFYLWFLFFSR

SEQ ID NO: 38238 - protein, 46 aa, Artificial Sequence
  Quasi-synthetic sequence derived from human genome
SLLLLLVVCGIGCVWHWKHRVATRFTLPRFLQRRSSRRKVCTKTFL

SEQ ID NO: 38239 - protein, 46 aa, Artificial Sequence
  Quasi-synthetic sequence derived from human genome
LKIVILGLVLPLLVMVICYSGILKTLLRCRNEKKRHRAVRLIFTIM

SEQ ID NO: 38240 - protein, 46 aa, Artificial Sequence
  Quasi-synthetic sequence derived from human genome
RWEGSAPRRLLLALHRRLRGLRRAAAGTSRLLFQRLLPCGVIKFRY

SEQ ID NO: 38241 - protein, 46 aa, Artificial Sequence
  Quasi-synthetic sequence derived from human genome
IVAAMRRIRYEFKAKNIKKKKVSIMVSVDGVKVILKKKKKKKEWTW

SEQ ID NO: 38242 - protein, 46 aa, Artificial Sequence
  Quasi-synthetic sequence derived from human genome
MWKGKTLRRQLQRQHKCAIIIQSYYRMHVQQKKWKIMKKAALLIQK

SEQ ID NO: 38243 - protein, 46 aa, Artificial Sequence
  Quasi-synthetic sequence derived from human genome
SRLAFQGWLRRGVLLVRAPPACLQVLRDAWRRRALRPPRGFRIRAV

SEQ ID NO: 38244 - protein, 46 aa, Artificial Sequence
  Quasi-synthetic sequence derived from human genome
VKILRVLRVLRPLRAINRAKGLKHVVQCVFVAIRTIGNIMIVTTLL

SEQ ID NO: 38245 - protein, 46 aa, Artificial Sequence
  Quasi-synthetic sequence derived from human genome
LTWIQYHSLDVIAFLLACVATVIFIITKFCLFCFRKLAKKGKKKKR

SEQ ID NO: 38246 - protein, 46 aa, Artificial Sequence
  Quasi-synthetic sequence derived from human genome
RNIGIWFFWIRLYKIRRGRTRPQALLFLCMILLLIVLHTSYMIYSL

SEQ ID NO: 38247 - protein, 46 aa, Artificial Sequence
  Quasi-synthetic sequence derived from human genome
LKKRAAFTKLRRAAILRRERQQKAPRHPLADILHRGCPLLRRWLCR

SEQ ID NO: 38248 - protein, 46 aa, Artificial Sequence
  Quasi-synthetic sequence derived from human genome
KMRQAWKSWLIYVVVRRTKLQMQTTALEFRQRIILRVWWSTWRQRL

SEQ ID NO: 38249 - protein, 46 aa, Artificial Sequence
  Quasi-synthetic sequence derived from human genome
LRTFRLLRVLKLVRFLPALRRQLVVLVKTMDNVATFCTLLMLFIFI

SEQ ID NO: 38250 - protein, 46 aa, Artificial Sequence
  Quasi-synthetic sequence derived from human genome
LRITLRFFASVLIRRIHKVDIPSIITKKLLKAAMKHIEVIVKARQK

SEQ ID NO: 38251 - protein, 46 aa, Artificial Sequence
  Quasi-synthetic sequence derived from human genome
KSKLSRRWRRWNRFNRRRCRAAVKSVTFYWLVIVLVFLNTLTISSE

SEQ ID NO: 38252 - protein, 46 aa, Artificial Sequence
  Quasi-synthetic sequence derived from human genome
KLKLNVLTIILLPVHLLITIYSALIFIPWYFLTNAKKKNAMAKRIK

SEQ ID NO: 38253 - protein, 46 aa, Artificial Sequence
  Quasi-synthetic sequence derived from human genome
ILKGKKCIVLVTELMTSGTLKTYLKRFKVMKPKVLRSWCRQILKGL

SEQ ID NO: 38254 - protein, 46 aa, Artificial Sequence
  Quasi-synthetic sequence derived from human genome
KGKATGRKAPLWLRAKFQRLLFKLGCYIQKNCGKFLVVGLLIFGAF

SEQ ID NO: 38255 - protein, 46 aa, Artificial Sequence
  Quasi-synthetic sequence derived from human genome
WKLFQALKLNLFGLVLPLLVMIICYTGIIKILLRRPNEKKSKAVRL

SEQ ID NO: 38256 - protein, 46 aa, Artificial Sequence
  Quasi-synthetic sequence derived from human genome
HRFLGRHFPRFYVLYTIFMKGLQMLWADAKKARRIKTNMWKHNIKF

SEQ ID NO: 38257 - protein, 46 aa, Artificial Sequence
  Quasi-synthetic sequence derived from human genome
LIQRHWRGHNCRKNYGLMRLGFLRLQALHRSRKLHQQYRLARQRII

SEQ ID NO: 38258 - protein, 46 aa, Artificial Sequence
  Quasi-synthetic sequence derived from human genome
FVYKLFSLQDLLLLVRCSVQRIETRPRSKKRKKIRRQFPVYVLPKV

SEQ ID NO: 38259 - protein, 46 aa, Artificial Sequence
  Quasi-synthetic sequence derived from human genome
FLNPFKKIKDHLLLIKKVTWTMNGLMLPTDIKRRKTKPVLSIRMKK

SEQ ID NO: 38260 - protein, 46 aa, Artificial Sequence
  Quasi-synthetic sequence derived from human genome
KIVWSLRRRQQLARQARMKKATRFIMVVAIVFITCYLPSVSARLYF

SEQ ID NO: 38261 - protein, 46 aa, Artificial Sequence
  Quasi-synthetic sequence derived from human genome
LKVIRTGKRKKKAWKRMVTKVCFVGDGFTRKPPKYERFIRPMGLRF

SEQ ID NO: 38262 - protein, 46 aa, Artificial Sequence
  Quasi-synthetic sequence derived from human genome
LRLQIIQRERRRKELFRKKNKAAAVIQRAWRSYQLRKHLSHLRHMK

SEQ ID NO: 38263 - protein, 46 aa, Artificial Sequence
  Quasi-synthetic sequence derived from human genome
RRMPGLGWMKKCYQMIDRRLRKNLKSFIIVHPSWFIRTILAVTRPF

SEQ ID NO: 38264 - protein, 46 aa, Artificial Sequence
  Quasi-synthetic sequence derived from human genome
RPKGYRKLLALGTWLLALLLTLPVMLAMRLVRRGPKSLCLPAWGPR

SEQ ID NO: 38265 - protein, 46 aa, Artificial Sequence
  Quasi-synthetic sequence derived from human genome
GFKKFYFHQHLCILKAKLGRPVTWNRQLRHFQGRKKALQIQKTWIK

SEQ ID NO: 38266 - protein, 46 aa, Artificial Sequence
  Quasi-synthetic sequence derived from human genome
FLRVVRFVRILRIFKLTRHFVGLRVLGHTLRASTNEFLLLIIFLAL

SEQ ID NO: 38267 - protein, 46 aa, Artificial Sequence
  Quasi-synthetic sequence derived from human genome
KKPLPWRSPLLLLAMWGPQAPPCLCRKRGRGACIKCERLRPRIRRR

SEQ ID NO: 38268 - protein, 46 aa, Artificial Sequence
  Quasi-synthetic sequence derived from human genome
RRRRAMRAFRMLLYSKSTSLTFHWKLWGRHRGRRRGLAHPKNHLSP

SEQ ID NO: 38269 - protein, 46 aa, Artificial Sequence
  Quasi-synthetic sequence derived from human genome
KKLVPVRRRAWGQLCLPPQRLRVTRHPLIPAPVLGLLLLLLLSVLL

SEQ ID NO: 38270 - protein, 46 aa, Artificial Sequence
  Quasi-synthetic sequence derived from human genome
KFHIRRFIFLFFILVIGIYPSGHSLILILGNPKLKQNAKKFLLHSK

SEQ ID NO: 38271 - protein, 46 aa, Artificial Sequence
  Quasi-synthetic sequence derived from human genome
KVFQCGKYLKVFYKFLNSNRHTIRHTGKKCFKCKKCVKSFCIRLHK

SEQ ID NO: 38272 - protein, 46 aa, Artificial Sequence
  Quasi-synthetic sequence derived from human genome
RMRGFQARKRYLRRRAALGQLNTILLVAQPLLQRRQRLQLGRWQGW

SEQ ID NO: 38273 - protein, 46 aa, Artificial Sequence
  Quasi-synthetic sequence derived from human genome
RKKKKTIKMLMLVVVLFALCWFPLNCYVLLLSSKVIRTNNALYFAF

SEQ ID NO: 38274 - protein, 46 aa, Artificial Sequence
  Quasi-synthetic sequence derived from human genome
PLCWGALAAQLALLGLGLLHALLLVLLLCRLRRLRARARARAAARL

SEQ ID NO: 38275 - protein, 46 aa, Artificial Sequence
  Quasi-synthetic sequence derived from human genome
GTKINLAVANTGILVFQGFTKINAFNWAKVRKLSFKRKRFLIKLRP

SEQ ID NO: 38276 - protein, 46 aa, Artificial Sequence
  Quasi-synthetic sequence derived from human genome
ILLLVDVVYIFFDIKLLRNIPRWTHLLRLLRLIILLRIFHLFHQKR

SEQ ID NO: 38277 - protein, 46 aa, Artificial Sequence
  Quasi-synthetic sequence derived from human genome
VIIFFAFVLLLSGALAYCLALQLYVRRRKKLPSVLLFKKPSPFIFI

SEQ ID NO: 38278 - protein, 46 aa, Artificial Sequence
  Quasi-synthetic sequence derived from human genome
LRRKLYIHRVTLRKLLPGVQYVYRCGSAQGWSRRFRFRALKNGAHW

SEQ ID NO: 38279 - protein, 46 aa, Artificial Sequence
  Quasi-synthetic sequence derived from human genome
LLKVKFDQKKRVKLAQGLWLMNWFSVLAGIIIFSLGLFLKIELRKR

SEQ ID NO: 38280 - protein, 46 aa, Artificial Sequence
  Quasi-synthetic sequence derived from human genome
IIHILQIRKLRHRLSNFPRLPGILAPETVLLPFCYKVFRKKEKVKR

SEQ ID NO: 38281 - protein, 46 aa, Artificial Sequence
  Quasi-synthetic sequence derived from human genome
WKRRILFFVVTLVSVFLVWKFTYAHKYLLADNRHYTFYVWKRVFQR

SEQ ID NO: 38282 - protein, 46 aa, Artificial Sequence
  Quasi-synthetic sequence derived from human genome
KKRAKTITFSKNAVISKRGGKLCLLIRVANLRKSLLIGSHIYGKLL

SEQ ID NO: 38283 - protein, 46 aa, Artificial Sequence
  Quasi-synthetic sequence derived from human genome
MKIFKCYFKHTLQQKVFILFLTLWLLSLLKLLNVRRLFPQKDIYLV

SEQ ID NO: 38284 - protein, 46 aa, Artificial Sequence
  Quasi-synthetic sequence derived from human genome
MKHFLRMLIQVCLYFYCKFLWRCLKFVMRKLTGRCELQRICYNTKP

SEQ ID NO: 38285 - protein, 46 aa, Artificial Sequence
  Quasi-synthetic sequence derived from human genome
PASSRRRGFGLFFFLRLHRLLLLFLVLRGTLANKLNVPQVLLPFGR

SEQ ID NO: 38286 - protein, 46 aa, Artificial Sequence
  Quasi-synthetic sequence derived from human genome
KKVLNLLKGAFPARLKKVLIVGAPIWFRVPYSIISLLLKDKVRERI

SEQ ID NO: 38287 - protein, 46 aa, Artificial Sequence
  Quasi-synthetic sequence derived from human genome
LQAAFRGMKTRRHLKSMHSSATLIQSRFRSLLVRRRFISLKKATIF

SEQ ID NO: 38288 - protein, 46 aa, Artificial Sequence
  Quasi-synthetic sequence derived from human genome
VLLCVMNLIILVNLIHLFIFRKSNFIFDKLHKVGIKTRRQWRRSQF

SEQ ID NO: 38289 - protein, 46 aa, Artificial Sequence
  Quasi-synthetic sequence derived from human genome
ILKRALKVKQAMMQLYVLKLLKVQTKYLGRQWRKSNMKTMSAIYQK

SEQ ID NO: 38290 - protein, 46 aa, Artificial Sequence
  Quasi-synthetic sequence derived from human genome
IKYLRKSLKIIYLNSIQELEIRNMSWPRLIRKLRCYLKEMKNLRKL

SEQ ID NO: 38291 - protein, 46 aa, Artificial Sequence
  Quasi-synthetic sequence derived from human genome
FVRQIQLLLWKNWTLRKRQKIRFVVELVWPLSLFLVLIWLRNANPL

SEQ ID NO: 38292 - protein, 46 aa, Artificial Sequence
  Quasi-synthetic sequence derived from human genome
SVERKRIQYLHAKLLKKRSKQPLGEVKRRLSLYLTKIHFWLPVLKM

SEQ ID NO: 38293 - protein, 46 aa, Artificial Sequence
  Quasi-synthetic sequence derived from human genome
ILRGKMMQRRPRSAEVKYFYFFKILLRLRLAILKYLFIDDKGILFV

SEQ ID NO: 38294 - protein, 46 aa, Artificial Sequence
  Quasi-synthetic sequence derived from human genome
RAYRDKLKFWTHCVLATLIMFTIFSFFAEQLIALKRKIFPRRRIHK

SEQ ID NO: 38295 - protein, 46 aa, Artificial Sequence
  Quasi-synthetic sequence derived from human genome
LAFRKAKIRDRVSKLLASVILLPWPPKVLGLKNVTGRLLVGLRWWN

SEQ ID NO: 38296 - protein, 46 aa, Artificial Sequence
  Quasi-synthetic sequence derived from human genome
LVRPRVFIKDMAPGKVVPMNCWGVYQAVRWLRWKASLIKLRALRRP

SEQ ID NO: 38297 - protein, 46 aa, Artificial Sequence
  Quasi-synthetic sequence derived from human genome
GIKIFRFVAPLYYINKECFKSALYKQTVNPILIKVAWKKAAKRKIK

SEQ ID NO: 38298 - protein, 46 aa, Artificial Sequence
  Quasi-synthetic sequence derived from human genome
ISKDGLPGRVPLWVILLSAFAGLLLLMLLILALWKIGFFKRPLKKK

SEQ ID NO: 38299 - protein, 46 aa, Artificial Sequence
  Quasi-synthetic sequence derived from human genome
GKAAINLAKLKLFRHYYVLIVCYIYFTRIIAFLLKLAVPFQWKWLY

SEQ ID NO: 38300 - protein, 46 aa, Artificial Sequence
  Quasi-synthetic sequence derived from human genome
FQQFSSLTNLPLRKLKFSPIKYGYQPRRNFWPARLATRLLKLRYLI

SEQ ID NO: 38301 - protein, 46 aa, Artificial Sequence
  Quasi-synthetic sequence derived from human genome
RKLLIQAAIVRIMKMRKVLKHQQLLGEVLTQLSSRFKPRVPVIKKC

SEQ ID NO: 38302 - protein, 46 aa, Artificial Sequence
  Quasi-synthetic sequence derived from human genome
RLRFLFNELRPAVCNDLSIMSKFKLLSSLPRWRRIAQKIIRERRKK

SEQ ID NO: 38303 - protein, 46 aa, Artificial Sequence
  Quasi-synthetic sequence derived from human genome
KGKKCIVLVTELMTSGTLKTYLKRFKVMKIKVLRSWCRQILKGLQF

SEQ ID NO: 38304 - protein, 46 aa, Artificial Sequence
  Quasi-synthetic sequence derived from human genome
FFLWLWTSFNTAFLALQSLRFGFGFRRGRSFLLRSWHHLMKRVQIK

SEQ ID NO: 38305 - protein, 46 aa, Artificial Sequence
  Quasi-synthetic sequence derived from human genome
ILRSHLIKATVIPNRVKMLPYFGIIRNRMMSTHKSKKKIREYYRLL

SEQ ID NO: 38306 - protein, 46 aa, Artificial Sequence
  Quasi-synthetic sequence derived from human genome
LLLQGLFIVLILVGYISVKVMLKSIKTRLGRRVPAAPPALRRNLLL

SEQ ID NO: 38307 - protein, 46 aa, Artificial Sequence
  Quasi-synthetic sequence derived from human genome
RANYWLKLVKGILPLVGMAMVPALLGLIGYHLYRKANRPKVSKKKL

SEQ ID NO: 38308 - protein, 46 aa, Artificial Sequence
  Quasi-synthetic sequence derived from human genome
RRMFHATVATQTQFFHVKVLNINLKRKFIKKRIIIISNYSKRNSLL

SEQ ID NO: 38309 - protein, 46 aa, Artificial Sequence
  Quasi-synthetic sequence derived from human genome
RKMPSLGWLRKCYQQIDRRLRKNLKSLIIVHPSWFIRTLLAVTRPF

SEQ ID NO: 38310 - protein, 46 aa, Artificial Sequence
  Quasi-synthetic sequence derived from human genome
VKLHWWRFLVIWILFSAVTAFVTFRATRKPLVQTTPRLVYKWFLLI

SEQ ID NO: 38311 - protein, 46 aa, Artificial Sequence
  Quasi-synthetic sequence derived from human genome
RAGVTLRVLRMMRIFWVIKLARHFIGLQTLGLTLKRCYREMVMLLV

SEQ ID NO: 38312 - protein, 46 aa, Artificial Sequence
  Quasi-synthetic sequence derived from human genome
LHREVVRKILLLQSWFRMVLERRHFLQMKRAAVTIQACWRSYRVRR

SEQ ID NO: 38313 - protein, 46 aa, Artificial Sequence
  Quasi-synthetic sequence derived from human genome
RAVLDVANHFSRLKIHFTKVFSAFALVRTIRYLYRRLQRMLGLRRG

SEQ ID NO: 38314 - protein, 46 aa, Artificial Sequence
  Quasi-synthetic sequence derived from human genome
FLVLQRRRLPPVRPHGPGPARGRPPHPALPHRRRLHGRPVRRLFLL

SEQ ID NO: 38315 - protein, 46 aa, Artificial Sequence
  Quasi-synthetic sequence derived from human genome
FYGRKIMRKVTTLPNTLVENTALPRQRARKRTKVLSLAKRILRFKK

SEQ ID NO: 38316 - protein, 46 aa, Artificial Sequence
  Quasi-synthetic sequence derived from human genome
IPSRFKRSYNYKTIVKKILAKLKRARSKKLDNFQSEKKVFKKSFLR

SEQ ID NO: 38317 - protein, 46 aa, Artificial Sequence
  Quasi-synthetic sequence derived from human genome
LRTAMRRQMRRHASRRGPSRRRLGRLWNRLFHRPRAPRGQIPLLTA

SEQ ID NO: 38318 - protein, 46 aa, Artificial Sequence
  Quasi-synthetic sequence derived from human genome
NAPNIPKLNRFLLLFIGFVCVLLSFFMARVFMRMKLPRSLALLPRL

SEQ ID NO: 38319 - protein, 46 aa, Artificial Sequence
  Quasi-synthetic sequence derived from human genome
RCLAVTRPFLAPRLRSPALARRLLLAVWLAALLLAVPAAVYRHLWR

SEQ ID NO: 38320 - protein, 46 aa, Artificial Sequence
  Quasi-synthetic sequence derived from human genome
RIPLVRNRRFQLCRCMNPRARKNRSQIALFQKLRFQFFCSMSGRAW

SEQ ID NO: 38321 - protein, 46 aa, Artificial Sequence
  Quasi-synthetic sequence derived from human genome
LRRIRAAVVLQKHYRMQRARQAYQRVRRAAVVIQAFTRAMFVRRTY

SEQ ID NO: 38322 - protein, 46 aa, Artificial Sequence
  Quasi-synthetic sequence derived from human genome
LLRSARRRRRGRTDGRRFLLRRAVPGHLGLARARVERAWLAAGLLK

SEQ ID NO: 38323 - protein, 46 aa, Artificial Sequence
  Quasi-synthetic sequence derived from human genome
MRPRSGGRPGATGRRRRRLRRRPRGLRCSRLPPPPPLPLLLGLLLA

SEQ ID NO: 38324 - protein, 46 aa, Artificial Sequence
  Quasi-synthetic sequence derived from human genome
KVAARMVWRLLHGQVLTRRERRRLLRTCVDFFRLVPFMVFLIVPFM

SEQ ID NO: 38325 - protein, 46 aa, Artificial Sequence
  Quasi-synthetic sequence derived from human genome
LMRKSQILISSWFRGNMQKKCYGKIKASVLLIQAFVRGWKARKNYR

SEQ ID NO: 38326 - protein, 46 aa, Artificial Sequence
  Quasi-synthetic sequence derived from human genome
SLSQIKFSPVAKKLFVVTAVSAISVIFLAHHFKRKRGKKKGKILPW

SEQ ID NO: 38327 - protein, 46 aa, Artificial Sequence
  Quasi-synthetic sequence derived from human genome
FWRNKKSNKVLPMRRVLRKRPSPAPRTIRIEWLKSKSTKAATKFML

SEQ ID NO: 38328 - protein, 46 aa, Artificial Sequence
  Quasi-synthetic sequence derived from human genome
RLWGIRKCKPHMNYDKLSRALRYYYNKRILHKTKGKRFTYKFNFSK

SEQ ID NO: 38329 - protein, 46 aa, Artificial Sequence
  Quasi-synthetic sequence derived from human genome
HDTLPRRRGRPSRRFLGKKYRKYYYKSPKPLLRPFLCRICGSRFLS

SEQ ID NO: 38330 - protein, 46 aa, Artificial Sequence
  Quasi-synthetic sequence derived from human genome
VRGWLVRKRFLEQRAKIRLLHFTAAAYYHLNAVRIQRAYKLYLAVK

SEQ ID NO: 38331 - protein, 46 aa, Artificial Sequence
  Quasi-synthetic sequence derived from human genome
LQAAFRRLKAHNLCRQIRAACVIQSYWRMRQDRVRFLNLKKTIIKF

SEQ ID NO: 38332 - protein, 46 aa, Artificial Sequence
  Quasi-synthetic sequence derived from human genome
RTAKPAHIAKVKMKFRFLGKLMAKAIMDFRLVDLPLGLPFYKWMLR

SEQ ID NO: 38333 - protein, 46 aa, Artificial Sequence
  Quasi-synthetic sequence derived from human genome
VFWVLHFLSNSPNSTVEAFSRSKKKKKKKKKRQCFAFLIYFRLGIK

SEQ ID NO: 38334 - protein, 46 aa, Artificial Sequence
  Quasi-synthetic sequence derived from human genome
KLLREGWVHANRPKRLLLVLVSAFFIFWSPFNVVLLVHLWRRVMLK

SEQ ID NO: 38335 - protein, 46 aa, Artificial Sequence
  Quasi-synthetic sequence derived from human genome
LVTILCLLAAGFVVYLKRKTLIRLLFTNKKTTIEKLRCVRPSRPPR

SEQ ID NO: 38336 - protein, 46 aa, Artificial Sequence
  Quasi-synthetic sequence derived from human genome
TLQMVLQRRKFLQMKRRKYGFIYKTHLFGRPTVRVMGADNVRRILL

SEQ ID NO: 38337 - protein, 46 aa, Artificial Sequence
  Quasi-synthetic sequence derived from human genome
RRKCKPQMNYDKLSRALRYYYNKRILHKTKGKRFTYKFNFSKLIVV

SEQ ID NO: 38338 - protein, 46 aa, Artificial Sequence
  Quasi-synthetic sequence derived from human genome
FDRFLKIIRPLRNIFLKKPVFAKTVSIFIWFFLFFISLPNTILSNK

SEQ ID NO: 38339 - protein, 46 aa, Artificial Sequence
  Quasi-synthetic sequence derived from human genome
NRQKVSGILQRVLLLFRAAQCSFPVAQWYILQLRWARKVMQKIRMK

SEQ ID NO: 38340 - protein, 46 aa, Artificial Sequence
  Quasi-synthetic sequence derived from human genome
LYMCHKCKKKQKSTKKFWIQKLPKVLCLHLKRFHWTAYLRNKVDTY

SEQ ID NO: 38341 - protein, 46 aa, Artificial Sequence
  Quasi-synthetic sequence derived from human genome
KFFLYVCMYVCIREKILLYKTHWMTPIFLKVVINTRRIKHHFKIHV

SEQ ID NO: 38342 - protein, 46 aa, Artificial Sequence
  Quasi-synthetic sequence derived from human genome
VLRFKYLLKQALATGMRRGLLARPLNSKARGATGSFKLVPKHKKKI

SEQ ID NO: 38343 - protein, 46 aa, Artificial Sequence
  Quasi-synthetic sequence derived from human genome
MKLLKLRRNIVKLSLYRHFTNTLILAVAASIVFIIWTTMKFRIVTC

SEQ ID NO: 38344 - protein, 46 aa, Artificial Sequence
  Quasi-synthetic sequence derived from human genome
LALRRRLGQLSCMSRPALKLRSWPLTVLYYLLPFGALRPLSRVGWR

SEQ ID NO: 38345 - protein, 46 aa, Artificial Sequence
  Quasi-synthetic sequence derived from human genome
RYNRKRFFALPYVDHFLRLEREKRARIKARKENLERKKAKILLKKF

SEQ ID NO: 38346 - protein, 46 aa, Artificial Sequence
  Quasi-synthetic sequence derived from human genome
KMAGVIAGLLMFIIILLGVMLTIKRRRNAYSYSYYLSQRKLAKKQK

SEQ ID NO: 38347 - protein, 46 aa, Artificial Sequence
  Quasi-synthetic sequence derived from human genome
LGLLVAGVLVLLVSLGVAIHLCCRRRRARLRFMKQLRLHPLEKCSR

SEQ ID NO: 38348 - protein, 46 aa, Artificial Sequence
  Quasi-synthetic sequence derived from human genome
IRHHVLTWVKFIIGYLFPLLTMSICYLCLIFKVKKRSILISSRHFW

SEQ ID NO: 38349 - protein, 46 aa, Artificial Sequence
  Quasi-synthetic sequence derived from human genome
LKKKLFKRRRVLNRERRLRHRVVGAVIDQGLITRHHLKKRASSARA

SEQ ID NO: 38350 - protein, 46 aa, Artificial Sequence
  Quasi-synthetic sequence derived from human genome
PKIPSIATGMVGALLLLLVVALGIGLFMRRRHIVRKRTLRRLLQER

SEQ ID NO: 38351 - protein, 46 aa, Artificial Sequence
  Quasi-synthetic sequence derived from human genome
QNDPRFIGNWWSGFLLCAIAMFLVIFPMFTFPKKLPPRHKKKKKKK

SEQ ID NO: 38352 - protein, 46 aa, Artificial Sequence
  Quasi-synthetic sequence derived from human genome
VLGKLKRNMMPWALQKKREIHMAKAHRRRAARSALPMRLTSCIFRR

SEQ ID NO: 38353 - protein, 46 aa, Artificial Sequence
  Quasi-synthetic sequence derived from human genome
FGFLLLYFPVFILYFKPSVFRCIALRWVRLLGFAIVYGTIILKLYR

SEQ ID NO: 38354 - protein, 46 aa, Artificial Sequence
  Quasi-synthetic sequence derived from human genome
VFGVRTSVSVIIALRRAVKRHRERRERQKRVFRMSLLIISTFLLCW

SEQ ID NO: 38355 - protein, 46 aa, Artificial Sequence
  Quasi-synthetic sequence derived from human genome
NKPVFMFCKAIRFSYPSIHPFILIWGNKKLKQTFLSVLRQVRYWVK

SEQ ID NO: 38356 - protein, 46 aa, Artificial Sequence
  Quasi-synthetic sequence derived from human genome
HKTFKIKQFLAKKQKQNRPIPQWIRMKTGNKIRYNSKRRHWKRTKL

SEQ ID NO: 38357 - protein, 46 aa, Artificial Sequence
  Quasi-synthetic sequence derived from human genome
KGMWICQVCRPKKKGRKLLHEKAAQIKRRYAKPIGRPKNKLKQRLL

SEQ ID NO: 38358 - protein, 46 aa, Artificial Sequence
  Quasi-synthetic sequence derived from human genome
RKFVFFNIPQIQYKNPWVQIMMFKNMTPSPFLRFYLGKPSGKRRRR

SEQ ID NO: 38359 - protein, 46 aa, Artificial Sequence
  Quasi-synthetic sequence derived from human genome
RFLCGFLVPVLIITACYLTIVCKLQRNRLAKTKKPFKIIVTIIITF

SEQ ID NO: 38360 - protein, 46 aa, Artificial Sequence
  Quasi-synthetic sequence derived from human genome
PGAWRRDIFGRIIWHKFKQWVIPWHLNKRYNRKRFFALPYVDHFLR

SEQ ID NO: 38361 - protein, 46 aa, Artificial Sequence
  Quasi-synthetic sequence derived from human genome
PLFALLSRGRRRRMHVLRRRWDLGSLCRALLTRGLAALGHSLKHVL

SEQ ID NO: 38362 - protein, 46 aa, Artificial Sequence
  Quasi-synthetic sequence derived from human genome
PKSVWYRIAFWLQWFNSFVNPLLYPLCHKRFQKAFLKIFCIKKQPL

SEQ ID NO: 38363 - protein, 46 aa, Artificial Sequence
  Quasi-synthetic sequence derived from human genome
LLLGSWALFFRRPKASLPRVFVLRALLMVLVFLLVVSYWLFYGVRI

SEQ ID NO: 38364 - protein, 46 aa, Artificial Sequence
  Quasi-synthetic sequence derived from human genome
ILGLFLLALLGLVVKRAVERRKALSRRARRLAVRMRALESSQRPRG

SEQ ID NO: 38365 - protein, 46 aa, Artificial Sequence
  Quasi-synthetic sequence derived from human genome
LVLPLLIMVICYSGILKTLLRCRNEKKRHRAVRVIFTIMIVYFLFW

SEQ ID NO: 38366 - protein, 46 aa, Artificial Sequence
  Quasi-synthetic sequence derived from human genome
SLPKYKKNLKALYVVHPTSFIKVLWNILKPLISHKFGKKVIYFNYL

SEQ ID NO: 38367 - protein, 46 aa, Artificial Sequence
  Quasi-synthetic sequence derived from human genome
RALCLLCFYLKYLNMYASICFLTCISLQRCFFLLKPFRARDWKRRY

SEQ ID NO: 38368 - protein, 46 aa, Artificial Sequence
  Quasi-synthetic sequence derived from human genome
KILRVLRVLRPLRAINRAKGLKHVVQCVFVAIRTIGNIVIVTTLLQ

SEQ ID NO: 38369 - protein, 46 aa, Artificial Sequence
  Quasi-synthetic sequence derived from human genome
NPRSLKHLCRLKIRKCMGRLHLRCPVFMSFLPLPNRLKAYVLYKEY

SEQ ID NO: 38370 - protein, 46 aa, Artificial Sequence
  Quasi-synthetic sequence derived from human genome
RNKLKYLAFLRKRMNTNPSRGPYHFRAPSRIFWRTVRGMLPHKTKR

SEQ ID NO: 38371 - protein, 46 aa, Artificial Sequence
  Quasi-synthetic sequence derived from human genome
GLVKRLHKVLRPFLLRRVKVDVEKQMPKKYEHVIRCRLSKRQRCLY

SEQ ID NO: 38372 - protein, 46 aa, Artificial Sequence
  Quasi-synthetic sequence derived from human genome
FDRKYKKNIKALYIVHPTMFIKTLLILFKPLISFKFGQKIFYVNYL

SEQ ID NO: 38373 - protein, 46 aa, Artificial Sequence
  Quasi-synthetic sequence derived from human genome
MKKQRKILWRKGIHLAFSEKWNTGFGGFKKFYFHQHLCILKAKLGR

SEQ ID NO: 38374 - protein, 46 aa, Artificial Sequence
  Quasi-synthetic sequence derived from human genome
RRGRPSRRFLGKKYRKYYYKSPKPLLRPFLCRICGSRFLSHEDLRF

SEQ ID NO: 38375 - protein, 46 aa, Artificial Sequence
  Quasi-synthetic sequence derived from human genome
LVKRARLVRVHAYIISYLKKEMPSVFGKENKKKQLILKLPVIFAKI

SEQ ID NO: 38376 - protein, 46 aa, Artificial Sequence
  Quasi-synthetic sequence derived from human genome
IQCWWRLILSKILKKRRQAALEAFSRKEWAAVTLQSQARMWRIRRR

SEQ ID NO: 38377 - protein, 46 aa, Artificial Sequence
  Quasi-synthetic sequence derived from human genome
WPALWELYRELGLFQGPALGLRNHLGRKLRRRKKKKAKRTTNWKII

SEQ ID NO: 38378 - protein, 46 aa, Artificial Sequence
  Quasi-synthetic sequence derived from human genome
RRRNTPFHERFFRFLLRKLYVFRRSFLMTCISLRNLILGRPSLEQL

SEQ ID NO: 38379 - protein, 46 aa, Artificial Sequence
  Quasi-synthetic sequence derived from human genome
RKLLSHGKKPFSQHVRKLRASITPGTILIILTGRHRGKRVVFLKQL

SEQ ID NO: 38380 - protein, 46 aa, Artificial Sequence
  Quasi-synthetic sequence derived from human genome
LWGRRKCKPQMNYDKLSRALRYYYNKRILHKTKGKRFTYKFNFNKL

SEQ ID NO: 38381 - protein, 46 aa, Artificial Sequence
  Quasi-synthetic sequence derived from human genome
VKPKIPKGVSRKLDRLAYIAHPKLGKRARARIAKGLRLCRPKAKAK

SEQ ID NO: 38382 - protein, 46 aa, Artificial Sequence
  Quasi-synthetic sequence derived from human genome
CWLLLVLVLVLLVSPRGCRARRGLRGLLMAHSQRLLFRIGYSLYTR

SEQ ID NO: 38383 - protein, 46 aa, Artificial Sequence
  Quasi-synthetic sequence derived from human genome
FVLPVCTICVLYTDLLRRLRAVRLRSGAKALGKARRKVTVLVLVVL

SEQ ID NO: 38384 - protein, 46 aa, Artificial Sequence
  Quasi-synthetic sequence derived from human genome
MKLLTLQPPGMLWLMERGGLGKPRGPRHRGLLRVRLGRFISRLLLW

SEQ ID NO: 38385 - protein, 46 aa, Artificial Sequence
  Quasi-synthetic sequence derived from human genome
KGFIQKRKFQEIKNSTIKIQAMWRRYRAKKYLCKVKAACKIQAWYR

SEQ ID NO: 38386 - protein, 46 aa, Artificial Sequence
  Quasi-synthetic sequence derived from human genome
YLARRAFQKRQQQQSALRVMQRNCAAYLKLRHWQWWRLFTKVKPLL

SEQ ID NO: 38387 - protein, 46 aa, Artificial Sequence
  Quasi-synthetic sequence derived from human genome
KLKEVTLFVKRLRRKTYLSNMAKTMRMVLKSKRRVSVLKSDLQAII

SEQ ID NO: 38388 - protein, 46 aa, Artificial Sequence
  Quasi-synthetic sequence derived from human genome
FLAEVKQMRARRKTAKMLMVVLLVFALCYLPISVLNVLKRVFGMFR

SEQ ID NO: 38389 - protein, 46 aa, Artificial Sequence
  Quasi-synthetic sequence derived from human genome
KWRMVLRILPHTFGFIVPLFVMLFCYGFTLRTLFKAHMGQKHRAMR

SEQ ID NO: 38390 - protein, 46 aa, Artificial Sequence
  Quasi-synthetic sequence derived from human genome
RHPRVFAWVYRHQARHKAVVLRCHAVLLARAHKARALARLLRQTAL

SEQ ID NO: 38391 - protein, 46 aa, Artificial Sequence
  Quasi-synthetic sequence derived from human genome
IVSQRKQIKRKAPRGFLKRVFKRKKPQLRLEKSGDLLVRFHPFSGW

SEQ ID NO: 38392 - protein, 46 aa, Artificial Sequence
  Quasi-synthetic sequence derived from human genome
KIIAGSVALFLSVAMILLVIYVSWKRYPASMKQLQQHSLMKRRRKK

SEQ ID NO: 38393 - protein, 46 aa, Artificial Sequence
  Quasi-synthetic sequence derived from human genome
IPLRPKHWFQLCRPMNPRARKNCSQIALFQKRRFQFFCSMRCRAWV

SEQ ID NO: 38394 - protein, 46 aa, Artificial Sequence
  Quasi-synthetic sequence derived from human genome
LLKELVRFQDRMYQKDPVKAKTKRRLVLGLREVLKHLKLKKLKCVI

SEQ ID NO: 38395 - protein, 46 aa, Artificial Sequence
  Quasi-synthetic sequence derived from human genome
KIQAWWRGTLVRRTLLHAALRAWIIQCWWRMTLSRVLEKKRQAALI

SEQ ID NO: 38396 - protein, 46 aa, Artificial Sequence
  Quasi-synthetic sequence derived from human genome
KRRKSNPKPLVLSEARKQLMIYRLPQVLRLHLKRFRWSGRNHREKI

SEQ ID NO: 38397 - protein, 46 aa, Artificial Sequence
  Quasi-synthetic sequence derived from human genome
RRKAGYKKKLWKKTPARKKRLREFVFCNKTQSKLLDKMTTSFWKRR

SEQ ID NO: 38398 - protein, 46 aa, Artificial Sequence
  Quasi-synthetic sequence derived from human genome
LLPVPGAKKSAKLYIPYIILTIIILTIVGFIWLLKVNGCRKYKLNK

SEQ ID NO: 38399 - protein, 46 aa, Artificial Sequence
  Quasi-synthetic sequence derived from human genome
FDRKYKKNLKALYVVHPTSFIKVLWNILKPLISHKFGKKVIYFNYL

SEQ ID NO: 38400 - protein, 46 aa, Artificial Sequence
  Quasi-synthetic sequence derived from human genome
FVAIFWIVFLLLIVFYTAITKKIFKSHLKSSRNSTSVKKKSSRNIF

SEQ ID NO: 38401 - protein, 46 aa, Artificial Sequence
  Quasi-synthetic sequence derived from human genome
RICSSAPLLYFLFICPFVLLLLLLISLLCLYWKARKLSTLRSNTRK

SEQ ID NO: 38402 - protein, 46 aa, Artificial Sequence
  Quasi-synthetic sequence derived from human genome
LVLKNRSLKLQKMKYRPPKTKFFFTVIPQPIFLSPGITLTLPIVFR

SEQ ID NO: 38403 - protein, 46 aa, Artificial Sequence
  Quasi-synthetic sequence derived from human genome
RLRGVRAVRPKVLMRLSKTKKHVSRAYGGSMCAKCVRDRIKRAFLI

SEQ ID NO: 38404 - protein, 46 aa, Artificial Sequence
  Quasi-synthetic sequence derived from human genome
KMVGPGFLSLGLMMLVCGLVWVPIIKKKQKHRQKSNFLRSLKSFFL

SEQ ID NO: 38405 - protein, 46 aa, Artificial Sequence
  Quasi-synthetic sequence derived from human genome
FWKHFLTLKMNISVLVLPLFIFTFLYVQMRKTLRFREQRYSLFKLV

SEQ ID NO: 38406 - protein, 46 aa, Artificial Sequence
  Quasi-synthetic sequence derived from human genome
VLRVMRLMRIFRILKLARHSTGLRAFGFTLRQCYQQVGCLLLFIAM

SEQ ID NO: 38407 - protein, 46 aa, Artificial Sequence
  Quasi-synthetic sequence derived from human genome
KYVKVFHKYSNSNRYKIRHTKKKTFKCMKCSKSFFMLSHLIQHKRI

SEQ ID NO: 38408 - protein, 46 aa, Artificial Sequence
  Quasi-synthetic sequence derived from human genome
LSGLSSKAAKDVLGFLRVVRFVRILRIFKLTRHFVGLRVLGHTLRA

SEQ ID NO: 38409 - protein, 46 aa, Artificial Sequence
  Quasi-synthetic sequence derived from human genome
RRNVNQTRLKRVLSGATLPDKLRDKLKLMKQRRKPPGFLALVKLLR

SEQ ID NO: 38410 - protein, 46 aa, Artificial Sequence
  Quasi-synthetic sequence derived from human genome
HLLRLLRLIILLRIFHLFHQKRQLEKLIRRRVSENKRRYTRDGFDL

SEQ ID NO: 38411 - protein, 46 aa, Artificial Sequence
  Quasi-synthetic sequence derived from human genome
INGKYHRFLGRHFPRFYVLYTIFMKGLQMLWADAKKARRIKTNMWK

SEQ ID NO: 38412 - protein, 46 aa, Artificial Sequence
  Quasi-synthetic sequence derived from human genome
PWPRPPPRRFSPPRRMLPPPPMWRRSPPRMRRRSRSPRRRSPVRRR

SEQ ID NO: 38413 - protein, 46 aa, Artificial Sequence
  Quasi-synthetic sequence derived from human genome
LRILHISVMGGMIALLLSILCLVMILYTRRRWCKRRRVPQPQKSAS

SEQ ID NO: 38414 - protein, 46 aa, Artificial Sequence
  Quasi-synthetic sequence derived from human genome
VRSLLSPGLLPHLLPALGFKNKTVLKKRCKDCYLVKRRGRWYVYCK

SEQ ID NO: 38415 - protein, 46 aa, Artificial Sequence
  Quasi-synthetic sequence derived from human genome
LGWMKKCYQMIDRRLRKNLKSFIIVHPSWFIRTILAVTRPFISSKF

SEQ ID NO: 38416 - protein, 46 aa, Artificial Sequence
  Quasi-synthetic sequence derived from human genome
AHPRMGVGCRLSRALLTAVTNVLIFFWCLAFLWGLLILLKYRWRKL

SEQ ID NO: 38417 - protein, 46 aa, Artificial Sequence
  Quasi-synthetic sequence derived from human genome
YLLIVVKVRSAGRRVWAPSCQRRRRSERRVTRMVVAVVALFVLCWM

SEQ ID NO: 38418 - protein, 46 aa, Artificial Sequence
  Quasi-synthetic sequence derived from human genome
GKLIRMGPQERWLLRTKRLHWSRLLFLLGMLIIGSTYQHLRRPRGL

SEQ ID NO: 38419 - protein, 46 aa, Artificial Sequence
  Quasi-synthetic sequence derived from human genome
RRVVQIFRIMRILRILKLARHSTGLQSLGFTLRRSYNELGLLILFL

SEQ ID NO: 38420 - protein, 46 aa, Artificial Sequence
  Quasi-synthetic sequence derived from human genome
RWRRLRLQQLRRLRGLLRVLRGRPGAGSRRRGRMALCGQAAGAASL

SEQ ID NO: 38421 - protein, 46 aa, Artificial Sequence
  Quasi-synthetic sequence derived from human genome
LQLLLWKNVTLKRRSPWVLAFEIFIPLVLFFILLGLRQKKPTISVK

SEQ ID NO: 38422 - protein, 46 aa, Artificial Sequence
  Quasi-synthetic sequence derived from human genome
ILLWYPVPCTRLPIRMAKALGKRTAKYRWFAVLYLLVCFLLLPSLV

SEQ ID NO: 38423 - protein, 46 aa, Artificial Sequence
  Quasi-synthetic sequence derived from human genome
KLCSRFLLKCGFITIPWRCIKKCSPLMPRAAVPRFVQQKLYLFLQH

SEQ ID NO: 38424 - protein, 46 aa, Artificial Sequence
  Quasi-synthetic sequence derived from human genome
IFSYPSTHPFILILGNKKLKQIFLSVLRHVRYWVKDRSLRLHRFTR

SEQ ID NO: 38425 - protein, 46 aa, Artificial Sequence
  Quasi-synthetic sequence derived from human genome
LLLLPLLLLLPLLLLKLHLWPQLRWLPADLAFAVRALCCKRALRAR

SEQ ID NO: 38426 - protein, 46 aa, Artificial Sequence
  Quasi-synthetic sequence derived from human genome
RVLVGVGVPVVFIIILVLCLRLLQSRCPRVLPKKLQNWNFLPLWMR

SEQ ID NO: 38427 - protein, 46 aa, Artificial Sequence
  Quasi-synthetic sequence derived from human genome
RIGRILRLIKGAKGIRTLLFALMMSLPALFNIGLLLFLVMFIFSIF

SEQ ID NO: 38428 - protein, 46 aa, Artificial Sequence
  Quasi-synthetic sequence derived from human genome
RPWPRWLGVAALGLAAVALGTVAWRRAWPRRRRRLQQVGTVAKLWI

SEQ ID NO: 38429 - protein, 46 aa, Artificial Sequence
  Quasi-synthetic sequence derived from human genome
VKMRKEVKRIRVLVIRKLVRSVGRLKSKKGTEDALLKNQRRAQRLL

SEQ ID NO: 38430 - protein, 46 aa, Artificial Sequence
  Quasi-synthetic sequence derived from human genome
FRGWVALVLHLRAHSAAKRPIACPKCERRFWRRKQLRAHLRRCHPP

SEQ ID NO: 38431 - protein, 46 aa, Artificial Sequence
  Quasi-synthetic sequence derived from human genome
RFLLRVRCWQYRQLSALHRAPRPTRPDKARRLGYKAKQGYVIYRIR

SEQ ID NO: 38432 - protein, 46 aa, Artificial Sequence
  Quasi-synthetic sequence derived from human genome
CKPIPVMLLGVTLLKKKYPLAKYLCVLLIVAGVALFMYKPKKVVGI

SEQ ID NO: 38433 - protein, 46 aa, Artificial Sequence
  Quasi-synthetic sequence derived from human genome
LFVFIYVQLWLVLRYRHKRLSYQSVFLFLCLFWASLRTVLFSFYFK

SEQ ID NO: 38434 - protein, 46 aa, Artificial Sequence
  Quasi-synthetic sequence derived from human genome
RIGRILRLVRAARGIRTLLFALMMSLPSLFNIGLLLFLIMFIYAIL

SEQ ID NO: 38435 - protein, 46 aa, Artificial Sequence
  Quasi-synthetic sequence derived from human genome
ILIILTGRHRGKRVVFLKQLASGLLLVTGPLVLNRVPLRRTHQKFV

SEQ ID NO: 38436 - protein, 46 aa, Artificial Sequence
  Quasi-synthetic sequence derived from human genome
IQLTVIMGYLRIIRFLPLFKIIVPILIRIADVQIKKRLSLMYSITK

SEQ ID NO: 38437 - protein, 46 aa, Artificial Sequence
  Quasi-synthetic sequence derived from human genome
LRNIRYGFNTILVILIWRIFIARSQMARNIWYFVVSLCYKFLSYFR

SEQ ID NO: 38438 - protein, 46 aa, Artificial Sequence
  Quasi-synthetic sequence derived from human genome
KYKKFPHWLDKWMLTRKQFGLLSLFFAVLHAIYTLSYAMRRSYRYK

SEQ ID NO: 38439 - protein, 46 aa, Artificial Sequence
  Quasi-synthetic sequence derived from human genome
RRKHAVAVIWAYWLGLKVRREYRKFFRANAGKKIYEFTLQRIVQKY

SEQ ID NO: 38440 - protein, 46 aa, Artificial Sequence
  Quasi-synthetic sequence derived from human genome
IVGLALSDLIQKYFVSPTLFRVIRLARIGRVLRLIRGAKGIRTLLF

SEQ ID NO: 38441 - protein, 46 aa, Artificial Sequence
  Quasi-synthetic sequence derived from human genome
PKYWDYRYKKNLKALYVVHPTSFIKVLWNILKPLISHKFGKKVIYF

SEQ ID NO: 38442 - protein, 46 aa, Artificial Sequence
  Quasi-synthetic sequence derived from human genome
LLKIKNTFCLWKRLIKLKDNHCEQLRVKIRKLKNKASVLQKRISEK

SEQ ID NO: 38443 - protein, 46 aa, Artificial Sequence
  Quasi-synthetic sequence derived from human genome
ILLVVAVFCILWNWNKRKKRQVPYLRVTVMPLLTLPQTRQRAKNIY

SEQ ID NO: 38444 - protein, 46 aa, Artificial Sequence
  Quasi-synthetic sequence derived from human genome
KRKFKSLLLHKRTAIQHAYRLLISQRRPAGISYRQFEGLMRFYKPR

SEQ ID NO: 38445 - protein, 46 aa, Artificial Sequence
  Quasi-synthetic sequence derived from human genome
RLVRVFRIFKLSRHSKGLQILGHTLRASMRELGLLIFFLFIGVILF

SEQ ID NO: 38446 - protein, 46 aa, Artificial Sequence
  Quasi-synthetic sequence derived from human genome
WTQVGFSLLFLYLGSGGWRFIRVFIKTIRRDIFGGLVLLKVKAKVR

SEQ ID NO: 38447 - protein, 46 aa, Artificial Sequence
  Quasi-synthetic sequence derived from human genome
KYKKFPHWLDKWMLTRKQFGLLSFFFAVLHAIYSLSYPMRRSYRYK

SEQ ID NO: 38448 - protein, 46 aa, Artificial Sequence
  Quasi-synthetic sequence derived from human genome
LMRRILTRNEKNRPRRRFLCHLSRQQLRMAMRIPVLYEQLKREKLR

SEQ ID NO: 38449 - protein, 46 aa, Artificial Sequence
  Quasi-synthetic sequence derived from human genome
AVLLLKKLKAWNDIKKVYASQRMRAGKGKMRNRRRIQRRGPCIIYN

SEQ ID NO: 38450 - protein, 46 aa, Artificial Sequence
  Quasi-synthetic sequence derived from human genome
HKTFTIKRFLAKKQKQNRPIPQWIQMKPGSKIRYNSKRRHWRRTKL

SEQ ID NO: 38451 - protein, 46 aa, Artificial Sequence
  Quasi-synthetic sequence derived from human genome
RLLPRNTFSRKAFKLKKPSKYCSWKCAALSAIAAALLLAILLAYFI

SEQ ID NO: 38452 - protein, 46 aa, Artificial Sequence
  Quasi-synthetic sequence derived from human genome
FLNHSNLWFAAWLKVFYCLRIANFNHPLFFLMKRKIIVLMPWLLRL

SEQ ID NO: 38453 - protein, 46 aa, Artificial Sequence
  Quasi-synthetic sequence derived from human genome
RGKFKVIALTVLASVRIYYQYRRVKPVTREIVIRDPYALRPLRRLI

SEQ ID NO: 38454 - protein, 46 aa, Artificial Sequence
  Quasi-synthetic sequence derived from human genome
LNLRYSFLKTASFFVRLGPMALAFKVRGLLDCKHSWKRLKDIRKIF

SEQ ID NO: 38455 - protein, 46 aa, Artificial Sequence
  Quasi-synthetic sequence derived from human genome
IFLYLKWRVKKVVLVLLLVTSVFLFLNIALINIHINASINGYRRNK

SEQ ID NO: 38456 - protein, 46 aa, Artificial Sequence
  Quasi-synthetic sequence derived from human genome
KYFMKLVNLYKGAVLYLLRGRKTFLIPVLFNNYITAALKLLEKLYK

SEQ ID NO: 38457 - protein, 46 aa, Artificial Sequence
  Quasi-synthetic sequence derived from human genome
LAVLGRALPTSRLDLACSLSWNVIRYSLQKLRLVRWLLKKVFQCRR

SEQ ID NO: 38458 - protein, 46 aa, Artificial Sequence
  Quasi-synthetic sequence derived from human genome
FRGHALPGTFFFIIGLWWCTKSILKYICKKQKRTCYLGSKTLFYRL

SEQ ID NO: 38459 - protein, 46 aa, Artificial Sequence
  Quasi-synthetic sequence derived from human genome
KRFGCLCGKRFAVKPKRDRHIMLTFSLRPFGCGICNKRFKLKHHLT

SEQ ID NO: 38460 - protein, 46 aa, Artificial Sequence
  Quasi-synthetic sequence derived from human genome
IQCWWRMTLSRVLEKKRQAALIAYATRERAVIKLQSLVRMWRVRWR

SEQ ID NO: 38461 - protein, 46 aa, Artificial Sequence
  Quasi-synthetic sequence derived from human genome
LLLRKILLRKFCQMRKRRLREQAPLLPTPTVIDPSRFCAQPFRWFL

SEQ ID NO: 38462 - protein, 46 aa, Artificial Sequence
  Quasi-synthetic sequence derived from human genome
RIGRILRLIKGAKGIRTLLFALMMSLPALFNIGLLLFLVMFIYAIF

SEQ ID NO: 38463 - protein, 46 aa, Artificial Sequence
  Quasi-synthetic sequence derived from human genome
RAKKYLCKVKAACKIQAWYRCWRAHKEYLAILKAVKIIQGCFYTKL

SEQ ID NO: 38464 - protein, 46 aa, Artificial Sequence
  Quasi-synthetic sequence derived from human genome
NTKNLLCLFCLKLFKTAIPYMNHCWRHSRRRVLQCSKCRLQFLTLK

SEQ ID NO: 38465 - protein, 46 aa, Artificial Sequence
  Quasi-synthetic sequence derived from human genome
MKATGKLYACKKLNKKRLKKRKGYQGAMVEKKILMKVHSRFIVSLA

SEQ ID NO: 38466 - protein, 46 aa, Artificial Sequence
  Quasi-synthetic sequence derived from human genome
KRGVRTLHQRFLAQLRKYFNMRVFRQRTYRIWAFGIAAAALGYFVP

SEQ ID NO: 38467 - protein, 46 aa, Artificial Sequence
  Quasi-synthetic sequence derived from human genome
KKNTLKKYKIACIVLLALLVIMSLGLGLGLGLRKLEKQGSCRKKCF

SEQ ID NO: 38468 - protein, 46 aa, Artificial Sequence
  Quasi-synthetic sequence derived from human genome
VCHGVLKRPARLPCSHIFCKKCILRWLARQKTCPCCRKEVKRKKVV

SEQ ID NO: 38469 - protein, 46 aa, Artificial Sequence
  Quasi-synthetic sequence derived from human genome
LFTAALWGALAALFCLQYLGVRVLLRFQRKLSVLLLLLGRRRVDFR

SEQ ID NO: 38470 - protein, 46 aa, Artificial Sequence
  Quasi-synthetic sequence derived from human genome
AINLAKLKLFRHYYVLIVCYIYFTRIIAFLLKLAVPFQWKWLYQLL

SEQ ID NO: 38471 - protein, 46 aa, Artificial Sequence
  Quasi-synthetic sequence derived from human genome
RLFCVFYGLFGVPLCLTWISALGKFFGGRAKRLGQFLTKRGVSLRK

SEQ ID NO: 38472 - protein, 46 aa, Artificial Sequence
  Quasi-synthetic sequence derived from human genome
YLAILKAVKIIQGCFYTKLERTRFLNVRASAIIIQRKWRAILPAKI

SEQ ID NO: 38473 - protein, 46 aa, Artificial Sequence
  Quasi-synthetic sequence derived from human genome
EWKTLQKKKQQKIKEKLRIRTKAAVKIQAWWRGTLVRRTLLHAALR

SEQ ID NO: 38474 - protein, 46 aa, Artificial Sequence
  Quasi-synthetic sequence derived from human genome
WGLGIEYTFPPLYYRRAHRRFVTKKALCIRVFQETQKLKKRRRALK

SEQ ID NO: 38475 - protein, 46 aa, Artificial Sequence
  Quasi-synthetic sequence derived from human genome
MRRHFRMKLRNLFTKFIRKFGFELVKRLLPEEYHRVLVNIRKAEAR

SEQ ID NO: 38476 - protein, 46 aa, Artificial Sequence
  Quasi-synthetic sequence derived from human genome
RRKEILAKYPAIKALMRPDPRLKWAVLVLVLVQMLACWLVRGLAWR

SEQ ID NO: 38477 - protein, 46 aa, Artificial Sequence
  Quasi-synthetic sequence derived from human genome
KSLVYGLVGAGVVLMLIILVALLMLVFRSKREVKRQKYRLSQLYKW

SEQ ID NO: 38478 - protein, 46 aa, Artificial Sequence
  Quasi-synthetic sequence derived from human genome
RVSRLGRRLGRRRRPRSPPEPLRVRARLRLRSPSGAFAALGALVVL

SEQ ID NO: 38479 - protein, 46 aa, Artificial Sequence
  Quasi-synthetic sequence derived from human genome
RLRVKAVTKIREFILQKIYSFRKPMTNYQIPQTALLKYRFFYQFLL

SEQ ID NO: 38480 - protein, 46 aa, Artificial Sequence
  Quasi-synthetic sequence derived from human genome
KWWRSFLGRKQYQLTVQVAYYTMMMNLYNAMAVRIQRRWRGYRVRK

SEQ ID NO: 38481 - protein, 46 aa, Artificial Sequence
  Quasi-synthetic sequence derived from human genome
MCCALFLLILLTGVLCHRFHGLWYMKMMWAWLQAKRKPRKAPSRNI

SEQ ID NO: 38482 - protein, 46 aa, Artificial Sequence
  Quasi-synthetic sequence derived from human genome
KRQRLPSVENRPKIAAFLPARQLWKWFGKPTQRRGMKGKARKLFYK

SEQ ID NO: 38483 - protein, 46 aa, Artificial Sequence
  Quasi-synthetic sequence derived from human genome
IFWINFLIVIVCYTLITKELYRSYVRTRGVGKVPRKKVNVKVFIII

SEQ ID NO: 38484 - protein, 46 aa, Artificial Sequence
  Quasi-synthetic sequence derived from human genome
LLIVGKMRAVALRAGWQQRRRSEKKITRLVLMVVVVFVLCWMPFYV

SEQ ID NO: 38485 - protein, 46 aa, Artificial Sequence
  Quasi-synthetic sequence derived from human genome
KLWSFFIYLLRRQIRTVIQYQTVRYDILPLSPVSRNRLAQVKRKIL

SEQ ID NO: 38486 - protein, 46 aa, Artificial Sequence
  Quasi-synthetic sequence derived from human genome
IVTANPWNTIALLCGAFLALFKAAEFAKLSIKWMIKIRKRYLKRRG

SEQ ID NO: 38487 - protein, 46 aa, Artificial Sequence
  Quasi-synthetic sequence derived from human genome
LFTWDKWLKVYKSIYFLGHIFFLSLLFILPYIHKAMVPRKEKLKKM

SEQ ID NO: 38488 - protein, 46 aa, Artificial Sequence
  Quasi-synthetic sequence derived from human genome
RIARILAGSKKKICTKKPRFMSACAQLVIAFILICIQLGIIVALFI

SEQ ID NO: 38489 - protein, 46 aa, Artificial Sequence
  Quasi-synthetic sequence derived from human genome
LKKNKIHSLPDKVFIKYTKLKKIFLQHNCIRHISRKAFFGLCNLQI

SEQ ID NO: 38490 - protein, 46 aa, Artificial Sequence
  Quasi-synthetic sequence derived from human genome
VITIQAGVRGYLARRRIRLWHRGAMVIQATWRGYRVRRNLAHLCRA

SEQ ID NO: 38491 - protein, 46 aa, Artificial Sequence
  Quasi-synthetic sequence derived from human genome
KKVINKGLFFLGSLIAISSTYLLIHYMSPRSFLRLRRPWNWIAHFR

SEQ ID NO: 38492 - protein, 46 aa, Artificial Sequence
  Quasi-synthetic sequence derived from human genome
FLERRLQTQVFKLGLAKSIHHARVLIRQRHIRVRKQVVNIPSFIVR

SEQ ID NO: 38493 - protein, 46 aa, Artificial Sequence
  Quasi-synthetic sequence derived from human genome
IARKLCAHYQQSGKHNKKLKKSIKIIFIVVAAFLVSWLPFNTFKFL

SEQ ID NO: 38494 - protein, 46 aa, Artificial Sequence
  Quasi-synthetic sequence derived from human genome
RIRISRVCHRWKRLVDDRWLWRHVDLTLYTMRPKVMWHLLRRYMAS

SEQ ID NO: 38495 - protein, 46 aa, Artificial Sequence
  Quasi-synthetic sequence derived from human genome
VRMRRYRMTHSEKKRLKQCNVITRLRGLQVPVGLPFLLILLGLYLM

SEQ ID NO: 38496 - protein, 46 aa, Artificial Sequence
  Quasi-synthetic sequence derived from human genome
RKFFLFYRQQKWASGVIAIAWLLYCHKTRLKKILKESRQRHLENFR

SEQ ID NO: 38497 - protein, 46 aa, Artificial Sequence
  Quasi-synthetic sequence derived from human genome
IVILYCRIYSLVRTRSRRLTFRKNISKASRSSEKSLALLKTVIIVL

SEQ ID NO: 38498 - protein, 46 aa, Artificial Sequence
  Quasi-synthetic sequence derived from human genome
ARNVKFPLPIYKSKKGWTAYKLQLFKMFPIILAILVSWLLCFIFTV

SEQ ID NO: 38499 - protein, 46 aa, Artificial Sequence
  Quasi-synthetic sequence derived from human genome
FHRLLLKWRGSIYKLLYREFIVFAVLYTAISLVYRLLLTGVQKRYF

SEQ ID NO: 38500 - protein, 46 aa, Artificial Sequence
  Quasi-synthetic sequence derived from human genome
IFMVKIFMLLVVGITSGMWIWTSKTLQSWQQVCSRRLKKKSRRKPA

SEQ ID NO: 38501 - protein, 46 aa, Artificial Sequence
  Quasi-synthetic sequence derived from human genome
MANSRFSCTQIWVKMYGYFAGLCRRLQKFWRVTVKGFFVKKKEKKI

SEQ ID NO: 38502 - protein, 46 aa, Artificial Sequence
  Quasi-synthetic sequence derived from human genome
RLVRVFRIFKLSRHSKGLQILGKTLQASMRELGLLIFFLFIGVILF

SEQ ID NO: 38503 - protein, 46 aa, Artificial Sequence
  Quasi-synthetic sequence derived from human genome
RLVRVFRIFKLSRHSKGLQILGQTLKASMRELGLLIFFLFIGVILF

SEQ ID NO: 38504 - protein, 46 aa, Artificial Sequence
  Quasi-synthetic sequence derived from human genome
VIKTRYRIVKKTPASPLSAPPFPLSLPSWRARRLSLSRSLVLNRLR

SEQ ID NO: 38505 - protein, 46 aa, Artificial Sequence
  Quasi-synthetic sequence derived from human genome
RISITFFRLFRVMRLVKLLSRGEGIRTLLWTFIKSFQALPYVALLI

SEQ ID NO: 38506 - protein, 46 aa, Artificial Sequence
  Quasi-synthetic sequence derived from human genome
VKVSLFTAFFLATIMGVRFKRSKKIMPAGLVAGLSLMMILRLVLLL

SEQ ID NO: 38507 - protein, 46 aa, Artificial Sequence
  Quasi-synthetic sequence derived from human genome
VTLWHLGYWLCYVNSTVNPICYALCNRTFRKTFKMLLLCRWKKKKV

SEQ ID NO: 38508 - protein, 46 aa, Artificial Sequence
  Quasi-synthetic sequence derived from human genome
RIGRILRLVKGAKGIRTLLFALMMSLPALFNIGLLLFLVMFIYAIF

SEQ ID NO: 38509 - protein, 46 aa, Artificial Sequence
  Quasi-synthetic sequence derived from human genome
LTLLIPYLLGRKRRWSKCKIRVFVGGQINRMDQERKAIISLLSKFR

SEQ ID NO: 38510 - protein, 46 aa, Artificial Sequence
  Quasi-synthetic sequence derived from human genome
IVGICLILIVIFMITKFVQDRHRARRNRLRKDQLKKLPVHKFKKGD

SEQ ID NO: 38511 - protein, 46 aa, Artificial Sequence
  Quasi-synthetic sequence derived from human genome
LYGFIFYLLASVLLSLLLILKAGRRWNKYFKSRRPLFTGGLIGGLF

SEQ ID NO: 38512 - protein, 46 aa, Artificial Sequence
  Quasi-synthetic sequence derived from human genome
ALNFVTMLKMVWISKASAIQRKGRAGRCRPGICFRLFSRLRFQNML

SEQ ID NO: 38513 - protein, 46 aa, Artificial Sequence
  Quasi-synthetic sequence derived from human genome
LKSVQLFSKKFKLWLLNALEGVPALLQISKLKEVTLFVKRLRRKTY

SEQ ID NO: 38514 - protein, 46 aa, Artificial Sequence
  Quasi-synthetic sequence derived from human genome
KVRAKETRKRALSRLKLKLNKDIVISVGIYNLVQKALKPPPIKLYR

SEQ ID NO: 38515 - protein, 46 aa, Artificial Sequence
  Quasi-synthetic sequence derived from human genome
RRAARRQVLSGHLPFCRFRLRYPSLSPSAFWVWKSLARGWPRGLSK

SEQ ID NO: 38516 - protein, 46 aa, Artificial Sequence
  Quasi-synthetic sequence derived from human genome
PIYPGHGMMFVRNDCKVFRFCKSKCHKNFKKKRNPRKVRWTKAFRK

SEQ ID NO: 38517 - protein, 46 aa, Artificial Sequence
  Quasi-synthetic sequence derived from human genome
RICSKLKAVLQKQGIWSEIHFILTNPRSLKHLCRLKIRKCMGRLHL

SEQ ID NO: 38518 - protein, 46 aa, Artificial Sequence
  Quasi-synthetic sequence derived from human genome
KVKKIWQKQFRWPKNRLQILKFCKAREDLLKIQKERDFHRMHHKRI

SEQ ID NO: 38519 - protein, 46 aa, Artificial Sequence
  Quasi-synthetic sequence derived from human genome
MTKLDRTAFKKTVNIPVLKVRKEIVSKLMRSLKRAALQRPGIRRVI

SEQ ID NO: 38520 - protein, 46 aa, Artificial Sequence
  Quasi-synthetic sequence derived from human genome
QIRKRLRCRRKTVLVLMCILTAYVLCWAPFYGFTIVRDFFPTVFVK

SEQ ID NO: 38521 - protein, 46 aa, Artificial Sequence
  Quasi-synthetic sequence derived from human genome
IIQRKWRAILPAKIAHEHFLMIKRHRAACLIQAHYRGYKGRQVFLR

SEQ ID NO: 38522 - protein, 46 aa, Artificial Sequence
  Quasi-synthetic sequence derived from human genome
LRTLRAVRVLRPLKLVSGIPSLQIVLKSIMKAMVPLLQIGLLLFFA

SEQ ID NO: 38523 - protein, 46 aa, Artificial Sequence
  Quasi-synthetic sequence derived from human genome
RLLRVLKLVRFMPALRRQLVVLMKTMDNVATFCMLLMLFIFIFSIL

SEQ ID NO: 38524 - protein, 46 aa, Artificial Sequence
  Quasi-synthetic sequence derived from human genome
YLLIIRSLRQGLRVEKRLKTKAVRMIAIVLAIFLVCFVPYHVNRSV

SEQ ID NO: 38525 - protein, 46 aa, Artificial Sequence
  Quasi-synthetic sequence derived from human genome
FLKVIGKGSFGKVLLAKRKLDGKFYAVKVLQKKIVLNRKEQKHIMA

SEQ ID NO: 38526 - protein, 46 aa, Artificial Sequence
  Quasi-synthetic sequence derived from human genome
RVSYRLLGVISLLHLVLSMGLQLYGFRQRQRARKEWRLHRGLSHRR

SEQ ID NO: 38527 - protein, 46 aa, Artificial Sequence
  Quasi-synthetic sequence derived from human genome
AKPFFRLQKFLRRTQFLLFFLTAAYLMTGSLLLLQRVRVALPQGPR

SEQ ID NO: 38528 - protein, 46 aa, Artificial Sequence
  Quasi-synthetic sequence derived from human genome
KAKALKAKKAVLKGVHSHKKKKIRTSPTFRRPKTLRLRRQPKYPRK

SEQ ID NO: 38529 - protein, 46 aa, Artificial Sequence
  Quasi-synthetic sequence derived from human genome
GLGRHLGVVIGILVAVILLLLLLLLLFLILRHRRQGKHWTSTQRKA

SEQ ID NO: 38530 - protein, 46 aa, Artificial Sequence
  Quasi-synthetic sequence derived from human genome
LKRIRKIKNVTNQIALLKLGKLPLLYKVGPVNVIQWFGQYFALFCW

SEQ ID NO: 38531 - protein, 46 aa, Artificial Sequence
  Quasi-synthetic sequence derived from human genome
NKPVFMFCKAIRFSYPSIHPFILIWGNKKLKQTFLSVFWQMRYWVK

SEQ ID NO: 38532 - protein, 46 aa, Artificial Sequence
  Quasi-synthetic sequence derived from human genome
VILSIVGTVLSDIIQKYFFSPTLFRVIRLARIGRILRLIRGAKGIR

SEQ ID NO: 38533 - protein, 46 aa, Artificial Sequence
  Quasi-synthetic sequence derived from human genome
RIGRVLRLIRGAKGIRTLLFALMMSLPALFNIGLLLFLVMFIYSIF

SEQ ID NO: 38534 - protein, 46 aa, Artificial Sequence
  Quasi-synthetic sequence derived from human genome
HLIKKAVAVRKHLERNRKDKDAKFRLILIESRIHRLARYYKTKRVL

SEQ ID NO: 38535 - protein, 46 aa, Artificial Sequence
  Quasi-synthetic sequence derived from human genome
WRRRKSLWLALSASWLLLVLLGGFSLLRLALPPRPRPGASQGWPRW

SEQ ID NO: 38536 - protein, 46 aa, Artificial Sequence
  Quasi-synthetic sequence derived from human genome
YLARQHFKKRKIQDLAIRCVQKNIKKNKGVKDWPWWKLFTTVRPLI

SEQ ID NO: 38537 - protein, 46 aa, Artificial Sequence
  Quasi-synthetic sequence derived from human genome
LNRAACHLKLKNLHKAIEDSSKAYRIMKRHLRLIHPTKLYKLMLRR

SEQ ID NO: 38538 - protein, 46 aa, Artificial Sequence
  Quasi-synthetic sequence derived from human genome
LRFPSRYWLGAYQLQRVVLAFMVPLGVITTSYLLLLAFLQRRQRRR

SEQ ID NO: 38539 - protein, 46 aa, Artificial Sequence
  Quasi-synthetic sequence derived from human genome
SCPFCLKLLLPGLLLLLVVIILILAFWVLPKYKTRKAMRNNVPRDR

SEQ ID NO: 38540 - protein, 46 aa, Artificial Sequence
  Quasi-synthetic sequence derived from human genome
RRSVQISVLLPAVNIRRRIKLTFPQPARPRAPRSLCLWQTWFAGKR

SEQ ID NO: 38541 - protein, 46 aa, Artificial Sequence
  Quasi-synthetic sequence derived from human genome
IPWKVLKVVAKVIRALLRILCCLLKAICRVLSIPVRVLVDVATFPV

SEQ ID NO: 38542 - protein, 46 aa, Artificial Sequence
  Quasi-synthetic sequence derived from human genome
FILGFLVPLTIICLCYLFIIIKVKSSGIRVGSSKRKKSEKKVTRMV

SEQ ID NO: 38543 - protein, 46 aa, Artificial Sequence
  Quasi-synthetic sequence derived from human genome
RQAHGSWFRLSFVYNHYLFFACILVVLLAIFLYLLRLRRIHHRQTR

SEQ ID NO: 38544 - protein, 46 aa, Artificial Sequence
  Quasi-synthetic sequence derived from human genome
FFRLFRVMRLIKLLSRAEGVRTLLWTFIKSFQALPYVALLIVMLFF

SEQ ID NO: 38545 - protein, 46 aa, Artificial Sequence
  Quasi-synthetic sequence derived from human genome
RRLRAIYTIMRWFRRHKVRAHLAELQRRFQAARQPPLYGRDLVWPL

SEQ ID NO: 38546 - protein, 46 aa, Artificial Sequence
  Quasi-synthetic sequence derived from human genome
LLPLHRPSWATWLDFLILKVAVGTRLHRVPVKIKRMCVNGLCRARK

SEQ ID NO: 38547 - protein, 46 aa, Artificial Sequence
  Quasi-synthetic sequence derived from human genome
FGIQSSAINVVKILRVLRVLRPLRAINRAKGLKHVVQCVFVAIRTI

SEQ ID NO: 38548 - protein, 46 aa, Artificial Sequence
  Quasi-synthetic sequence derived from human genome
KHKKKVNKGSTAARTFYLIKDIRFLLHEPIVNKFREYKVFVRKLRK

SEQ ID NO: 38549 - protein, 46 aa, Artificial Sequence
  Quasi-synthetic sequence derived from human genome
LGRLAAIVAKQVLLGRKVVVVRCEGINISGNFYRNKLKYLAFLRKR

SEQ ID NO: 38550 - protein, 46 aa, Artificial Sequence
  Quasi-synthetic sequence derived from human genome
MAVLRQLALLLWKNYTLQKRKVLVTVLELFLPLLFSGILIWLRLKI

SEQ ID NO: 38551 - protein, 46 aa, Artificial Sequence
  Quasi-synthetic sequence derived from human genome
PLRRGRPKRRRKPQPHSGSVLALPLRSRKIRKQLRSVVSRMAALRT

SEQ ID NO: 38552 - protein, 46 aa, Artificial Sequence
  Quasi-synthetic sequence derived from human genome
FWRRLLGLLPGRPGLAALLGRLSDRLGRNRDRQRRRSPWLLLAPLL

SEQ ID NO: 38553 - protein, 46 aa, Artificial Sequence
  Quasi-synthetic sequence derived from human genome
IYFIHSLCLLGRLLIYKQGRKLFPIKLKNKKGLVSLIDLLVLFTQL

SEQ ID NO: 38554 - protein, 46 aa, Artificial Sequence
  Quasi-synthetic sequence derived from human genome
MRKRKISVCQQTWALLCKNFLKKWRMKRESLMEWLNSLLLLLCLYI

SEQ ID NO: 38555 - protein, 46 aa, Artificial Sequence
  Quasi-synthetic sequence derived from human genome
PLWLRDTYKLWVPQPPPRTIKRTRRRLSRNRDPGRLILSTIRLRPR

SEQ ID NO: 38556 - protein, 46 aa, Artificial Sequence
  Quasi-synthetic sequence derived from human genome
HKRNLYYFSYPLFVGFALLRLVAFHLGLLFVWLCQRFSRALMAAKR

SEQ ID NO: 38557 - protein, 46 aa, Artificial Sequence
  Quasi-synthetic sequence derived from human genome
MCFLRRPGAPASWIWWRMLRQVLRRGLQSFCHRLGLCVSRHPVFFL

SEQ ID NO: 38558 - protein, 46 aa, Artificial Sequence
  Quasi-synthetic sequence derived from human genome
IRIMRVLRIARVLKLLKMAVGMRALLDTVGNLGLLFMLLFFIFAAL

SEQ ID NO: 38559 - protein, 46 aa, Artificial Sequence
  Quasi-synthetic sequence derived from human genome
YFGVRALHRLHQFQQLLWVLGLLVGLLLLLLGLGACYTWRRRRVCK

SEQ ID NO: 38560 - protein, 46 aa, Artificial Sequence
  Quasi-synthetic sequence derived from human genome
LGKQKKKYMPYNHQHKYFFLIGPPALLPLYFQWYIFYFVIQRKKWV

SEQ ID NO: 38561 - protein, 46 aa, Artificial Sequence
  Quasi-synthetic sequence derived from human genome
RAHRAYLTLLFATSIAGPGLLIGLLYARLARAYRRSQRASFKRARR

SEQ ID NO: 38562 - protein, 46 aa, Artificial Sequence
  Quasi-synthetic sequence derived from human genome
RQTRTLLLKNYLIKCRTKKSSVQEILFPLFFLFWLILISMMHPNKK

SEQ ID NO: 38563 - protein, 46 aa, Artificial Sequence
  Quasi-synthetic sequence derived from human genome
CKQRFTKITQYLIRIRKLTLKRQRKLVPLSKKVERREKRREEKALI

SEQ ID NO: 38564 - protein, 46 aa, Artificial Sequence
  Quasi-synthetic sequence derived from human genome
KFMNELHKIPLPPWALIAIAIVAVLLVLTCCFCICKKCLFKKKNKK

SEQ ID NO: 38565 - protein, 46 aa, Artificial Sequence
  Quasi-synthetic sequence derived from human genome
PLRYSSILTSNRVAKMGLILAIRSILLVIPFPFTLRRLKYCQKNLL

SEQ ID NO: 38566 - protein, 46 aa, Artificial Sequence
  Quasi-synthetic sequence derived from human genome
WTLALCWALLLWKMRLFQRQWANSFFQGLQQRMLQRSLRWWHLRAL

SEQ ID NO: 38567 - protein, 46 aa, Artificial Sequence
  Quasi-synthetic sequence derived from human genome
TVFLLAILGGMAFILLVLLCLLLYYCRRKCLKPRQHHRKLQLPAGL

SEQ ID NO: 38568 - protein, 46 aa, Artificial Sequence
  Quasi-synthetic sequence derived from human genome
LRCIRLLRIFKITKYWTSLSNLVASLLNSIRSIASLLLLLFLFIVI

SEQ ID NO: 38569 - protein, 46 aa, Artificial Sequence
  Quasi-synthetic sequence derived from human genome
LFSKVLVTIKKVYMKERSFKGVEFGKNLGLKSSLIRKPRIVSRGRR

SEQ ID NO: 38570 - protein, 46 aa, Artificial Sequence
  Quasi-synthetic sequence derived from human genome
QLLLILRGQTRHQVRKGVAVRARPWRKNLQEVFGKRWLLGLLVPMF

SEQ ID NO: 38571 - protein, 46 aa, Artificial Sequence
  Quasi-synthetic sequence derived from human genome
TYHTIFLLTILAALALLVLILLCLLIYYCRRRCLKPRQQHRKLQLS

SEQ ID NO: 38572 - protein, 46 aa, Artificial Sequence
  Quasi-synthetic sequence derived from human genome
GLGRHLGVVIGILVAVVLLLLLLLLLFLILRHRRQGKHWTSTQRKA

SEQ ID NO: 38573 - protein, 46 aa, Artificial Sequence
  Quasi-synthetic sequence derived from human genome
FLWFRSKQEALKQGWLHKKGGGSSTLSRRNWKKRWFVLRQSKLMYF

SEQ ID NO: 38574 - protein, 46 aa, Artificial Sequence
  Quasi-synthetic sequence derived from human genome
NRLRNAKIYVERAVKQKKIFTIQGCYPVIRCLLRRRGWVEKKMVHR

SEQ ID NO: 38575 - protein, 46 aa, Artificial Sequence
  Quasi-synthetic sequence derived from human genome
RSFRRHIRQHSALTRLRLRNVFRRFLRDFQPGRLSQQMVMVKYLAT

SEQ ID NO: 38576 - protein, 46 aa, Artificial Sequence
  Quasi-synthetic sequence derived from human genome
RLRVQQAALRAARLRHQELFRLRGIKAQVALRLAELARRQRRRQAR

SEQ ID NO: 38577 - protein, 46 aa, Artificial Sequence
  Quasi-synthetic sequence derived from human genome
AAWLLAWPGLALPLVAMAAGGRWVRQQGPRVRRGISRLWLRVLLRL

SEQ ID NO: 38578 - protein, 46 aa, Artificial Sequence
  Quasi-synthetic sequence derived from human genome
RGALARKAIQRRKWAVRIIRKFIKGFISRNKPLCPDNEEFIVFVRK

SEQ ID NO: 38579 - protein, 46 aa, Artificial Sequence
  Quasi-synthetic sequence derived from human genome
RHVPLRRIHLFTLVQILCLAVLWILKSTVAAIIFPVMILGLIIVRR

SEQ ID NO: 38580 - protein, 46 aa, Artificial Sequence
  Quasi-synthetic sequence derived from human genome
PFLLAGLIGGAVIFVLVVLLSVFCWHMHKKGRYTSQKWKYNRGRRK

SEQ ID NO: 38581 - protein, 46 aa, Artificial Sequence
  Quasi-synthetic sequence derived from human genome
RMKHLKTLPMVPFKTKDSPGVFSKLGVLLRRVTRNLVRNKLAVITR

SEQ ID NO: 38582 - protein, 46 aa, Artificial Sequence
  Quasi-synthetic sequence derived from human genome
FRLFRVMRLVKLLSRGEGIRTLLWTFIKSFQALPYVALLIVMLFFI

SEQ ID NO: 38583 - protein, 46 aa, Artificial Sequence
  Quasi-synthetic sequence derived from human genome
FRTHHTGLLSVLAMFFLLVLILSSVFLFRLFKRRQGRIFPEGKMWK

SEQ ID NO: 38584 - protein, 46 aa, Artificial Sequence
  Quasi-synthetic sequence derived from human genome
LVVVNALLRKRRYHAALAVLKGFRNGAVYGAKIRAPHALVMTFLFR

SEQ ID NO: 38585 - protein, 46 aa, Artificial Sequence
  Quasi-synthetic sequence derived from human genome
IKAIDIYILVCLFFVFLSLLEYVYINYLFYSRGPRRQPRRHRRPRR

SEQ ID NO: 38586 - protein, 46 aa, Artificial Sequence
  Quasi-synthetic sequence derived from human genome
TQHKGRLKHRGSSLHPFRKGLQEKDKVWLLREQKRKKKLRKLLKRL

SEQ ID NO: 38587 - protein, 46 aa, Artificial Sequence
  Quasi-synthetic sequence derived from human genome
VRRRRRRPGGRVPKDRPSLTVTPKRWKLRARPSLTVTPRRLGLRAR

SEQ ID NO: 38588 - protein, 46 aa, Artificial Sequence
  Quasi-synthetic sequence derived from human genome
KLLAKRRRMVLEFYVQQEWAAVRLQSWVRMWCVRQRYCRLLNAVRI

SEQ ID NO: 38589 - protein, 46 aa, Artificial Sequence
  Quasi-synthetic sequence derived from human genome
AKMKKKTFKGLIRIFRKGVIAVLAANRLKILGQSCASLFTWMESFK

SEQ ID NO: 38590 - protein, 46 aa, Artificial Sequence
  Quasi-synthetic sequence derived from human genome
RNNFWIILAVAIIVVSVGLGLILYCVCKWQLRRGKKWEIAKPLKHK

SEQ ID NO: 38591 - protein, 46 aa, Artificial Sequence
  Quasi-synthetic sequence derived from human genome
YRTYRCAHPLATLFKILASFYISLVIFYGLICMYTLWWMLRRSLKK

SEQ ID NO: 38592 - protein, 46 aa, Artificial Sequence
  Quasi-synthetic sequence derived from human genome
MAVLDFLLMQTHSFAIYHQSLFRILKVFKSLRALRAIRVLRRLSFL

SEQ ID NO: 38593 - protein, 46 aa, Artificial Sequence
  Quasi-synthetic sequence derived from human genome
KRRKKRYLRHDKPPYTYLAMIALVIQAAPSRRLKLAQIIRQVQAVF

SEQ ID NO: 38594 - protein, 46 aa, Artificial Sequence
  Quasi-synthetic sequence derived from human genome
RFRRSRSPMHYMYRPRSRSPRICHRFISRYRSRSRSRSPYRIRNPF

SEQ ID NO: 38595 - protein, 46 aa, Artificial Sequence
  Quasi-synthetic sequence derived from human genome
LKRDVAHKVFATTSIKSFFRQLNLYGFRKRRQCTFRTFTRIFSAKR

SEQ ID NO: 38596 - protein, 46 aa, Artificial Sequence
  Quasi-synthetic sequence derived from human genome
LLYWKNTLALAAILVLLRVRQCLSLRPAPAMRVARPQPQRSLRLIL

SEQ ID NO: 38597 - protein, 46 aa, Artificial Sequence
  Quasi-synthetic sequence derived from human genome
RLRHPRTRWKNWWVRGILTLAMIAFFFIIIYLGPMVLMIIVMCVQI

SEQ ID NO: 38598 - protein, 46 aa, Artificial Sequence
  Quasi-synthetic sequence derived from human genome
WRMLLRILPQSFGFIVPLLIMLFCYGFTLRTLFKAHMGQKHRAMRV

SEQ ID NO: 38599 - protein, 46 aa, Artificial Sequence
  Quasi-synthetic sequence derived from human genome
ILRSLTDAVPLSVLILGLLIMFITIVFCAAGIVVLVLHRRRRYKKK

SEQ ID NO: 38600 - protein, 46 aa, Artificial Sequence
  Quasi-synthetic sequence derived from human genome
AAWTVAVRTEAVMRRHCRTLRQRSRRPKMRPARRRGGRRQLLLRAL

SEQ ID NO: 38601 - protein, 46 aa, Artificial Sequence
  Quasi-synthetic sequence derived from human genome
KLMRIKFQKILEERDALILIQWNIRAFMAVKNWPWMRLFFKIKPLV

SEQ ID NO: 38602 - protein, 46 aa, Artificial Sequence
  Quasi-synthetic sequence derived from human genome
GVKKLPGVMLFKKKKTRKLKIALALSDLVIYTKAEKFKSFQHSRLY

SEQ ID NO: 38603 - protein, 46 aa, Artificial Sequence
  Quasi-synthetic sequence derived from human genome
FLKITSTRLLCSRLCQQLRSKRKFFGTVPISRLHRRVVITGIGLVT

SEQ ID NO: 38604 - protein, 46 aa, Artificial Sequence
  Quasi-synthetic sequence derived from human genome
WRGYRQRKIYLEWLQYFKANLDAIIKIQAWARMWAARRQYLRRLHY

SEQ ID NO: 38605 - protein, 46 aa, Artificial Sequence
  Quasi-synthetic sequence derived from human genome
GHLALILSSIFGLLLLVLFILFLTWCRVQKQKHLPLRVSTRRRGSL

SEQ ID NO: 38606 - protein, 46 aa, Artificial Sequence
  Quasi-synthetic sequence derived from human genome
ICKFVRFLFYWNLYCSVLFLTCISVHRYLGICHPLRALRWGRPRLA

SEQ ID NO: 38607 - protein, 46 aa, Artificial Sequence
  Quasi-synthetic sequence derived from human genome
TVLTVRPPLLPYIVNIKGQRIKKSVAYKTKKPPSLMYNVRKKKGKI

SEQ ID NO: 38608 - protein, 46 aa, Artificial Sequence
  Quasi-synthetic sequence derived from human genome
RLRFGPRRALAALVRRGWRCGYLECSAKYNWHVLRLFRELLRCALV

SEQ ID NO: 38609 - protein, 46 aa, Artificial Sequence
  Quasi-synthetic sequence derived from human genome
IVIFCYLRIWILVLQVRQRVKPDRKPKLKPQDFRNFVTMFVVFVLF

SEQ ID NO: 38610 - protein, 46 aa, Artificial Sequence
  Quasi-synthetic sequence derived from human genome
RTALRGAPRLLSRVQPRAPCLRRLWGRGARPEVAGRRRAWAWGWRR

SEQ ID NO: 38611 - protein, 46 aa, Artificial Sequence
  Quasi-synthetic sequence derived from human genome
ALRYNILTLMRMLSLKSLKKQMKKVKKMTVKDMVTAFFSSYWSIFM

SEQ ID NO: 38612 - protein, 46 aa, Artificial Sequence
  Quasi-synthetic sequence derived from human genome
ARSFALLLPVYALGYLGLSFSWVLLALALLAWCRRSRGLKALRLCR

SEQ ID NO: 38613 - protein, 46 aa, Artificial Sequence
  Quasi-synthetic sequence derived from human genome
ILIICILITGLGIISVISHLTKRRRSQRNRRVGNTLKPFSRVLTPK

SEQ ID NO: 38614 - protein, 46 aa, Artificial Sequence
  Quasi-synthetic sequence derived from human genome
KFLYFLRSRVPGLPPTPVQLLYPVSRFSNVKSLQHLCRFRIRQLVR

SEQ ID NO: 38615 - protein, 46 aa, Artificial Sequence
  Quasi-synthetic sequence derived from human genome
FQGCLYLIYNLLQAVFFVLFVLSVHYLWKKWKKHQKKLKKQASLEK

SEQ ID NO: 38616 - protein, 46 aa, Artificial Sequence
  Quasi-synthetic sequence derived from human genome
ARIIGAVLKIKTASGRKKAFSTCASHLAVVLIFFGSIIFMYVRLKK

SEQ ID NO: 38617 - protein, 46 aa, Artificial Sequence
  Quasi-synthetic sequence derived from human genome
MRLTRKRLCSFLIALYCLFSLYAAYHVFFGRRRQAPAGSPRGLRKG

SEQ ID NO: 38618 - protein, 46 aa, Artificial Sequence
  Quasi-synthetic sequence derived from human genome
LLRWARLLGFATVYGTVTLKLHRVLKVFLSRTAQRIPYMTGGRVMR

SEQ ID NO: 38619 - protein, 46 aa, Artificial Sequence
  Quasi-synthetic sequence derived from human genome
LKKITKTVQQRYWAMKERNIQFQRYNKLRHSVIYIQAIFRGKKARR

SEQ ID NO: 38620 - protein, 46 aa, Artificial Sequence
  Quasi-synthetic sequence derived from human genome
RVAKKLWLCNMIGDVTTEQYFALRRKKKKTIKMLMLVVVLFALCWF

SEQ ID NO: 38621 - protein, 46 aa, Artificial Sequence
  Quasi-synthetic sequence derived from human genome
AAAPRALLPQWPRRPGRRWPASPLGMKVFRRKALVLCAGYALLLVL

SEQ ID NO: 38622 - protein, 46 aa, Artificial Sequence
  Quasi-synthetic sequence derived from human genome
KGSYQVKGWKLTQQQFVALLWKRLLIARRSRKGFFAQIVLPAVFVC

SEQ ID NO: 38623 - protein, 46 aa, Artificial Sequence
  Quasi-synthetic sequence derived from human genome
VLLLLLLFYVVRYCWLRRQAALQRRLSAMEKGKLHKPGKDASKRGR

SEQ ID NO: 38624 - protein, 46 aa, Artificial Sequence
  Quasi-synthetic sequence derived from human genome
LTRLTFFFLIPLFIMIGCYLVIIHNLLHGRTSKLKPKVKEKSIRII

SEQ ID NO: 38625 - protein, 46 aa, Artificial Sequence
  Quasi-synthetic sequence derived from human genome
PVFAFLGAMVVLAFFVVQINKAKSRPKRRKPRVKRPQLMQQVHPPK

SEQ ID NO: 38626 - protein, 46 aa, Artificial Sequence
  Quasi-synthetic sequence derived from human genome
LFRKPQRSFFGKLLREFRLVAADRRSWKILLFGVINLICTGFLLMW

SEQ ID NO: 38627 - protein, 46 aa, Artificial Sequence
  Quasi-synthetic sequence derived from human genome
IWLATSLSIFYLLKIVNFSRLIFHHLKRKAKSVVLVIVLGSLFFLV

SEQ ID NO: 38628 - protein, 46 aa, Artificial Sequence
  Quasi-synthetic sequence derived from human genome
VRKSIARVLTVINQTQKENLRKFYKGKKYKPLDLRPKKTRAMRRRL

SEQ ID NO: 38629 - protein, 46 aa, Artificial Sequence
  Quasi-synthetic sequence derived from human genome
RPFQCCFCQKGFKIQSKLLKHKQIHTRNKAFRALLLKKRRTESRPL

SEQ ID NO: 38630 - protein, 46 aa, Artificial Sequence
  Quasi-synthetic sequence derived from human genome
LVALLGWSWLRRRRARGIPPGPTPWPLVGNFGHVLLPPFLRRRSWL

SEQ ID NO: 38631 - protein, 46 aa, Artificial Sequence
  Quasi-synthetic sequence derived from human genome
AKINLLFVAIFTGTVLSDIIQKYFFSPTLFRVIRLARIGRILRLIR

SEQ ID NO: 38632 - protein, 46 aa, Artificial Sequence
  Quasi-synthetic sequence derived from human genome
KKKMSKLSRSARAGVIFPVGRLMRYLKKGTFKYRISVGAPVYMAAV

SEQ ID NO: 38633 - protein, 46 aa, Artificial Sequence
  Quasi-synthetic sequence derived from human genome
KTLLRCPSKKKYKAIRLIFVIMAVFFIFWTPYNVAILLSSYQSILF

SEQ ID NO: 38634 - protein, 46 aa, Artificial Sequence
  Quasi-synthetic sequence derived from human genome
AARGAPRGSRRPGRTPKWRLPRISARAPYRLRRLRRHTYWPPRRPV

SEQ ID NO: 38635 - protein, 46 aa, Artificial Sequence
  Quasi-synthetic sequence derived from human genome
VKIRSRKLGIFRRCWLVFKKASSKGPRRLEKFPDEKAAYFRNFHKV

SEQ ID NO: 38636 - protein, 46 aa, Artificial Sequence
  Quasi-synthetic sequence derived from human genome
PLTIVFKHKHKDCVLYLLSKMWSTVSFPKISVPMRIYIKIKQWILR

SEQ ID NO: 38637 - protein, 46 aa, Artificial Sequence
  Quasi-synthetic sequence derived from human genome
VSQLRGARVITPEDLLFLMRKDKKKLRRLLKYMFIRDYKSKIVKGI

SEQ ID NO: 38638 - protein, 46 aa, Artificial Sequence
  Quasi-synthetic sequence derived from human genome
LRVLPSVFWSPPSRKKPVLSARNSRMFGHLSPVRIPHLRGKFNLRL

SEQ ID NO: 38639 - protein, 46 aa, Artificial Sequence
  Quasi-synthetic sequence derived from human genome
MFRKPYVRRRPSKRRGARAFRCIKPAPVIHPASVIFTVPATTVKIV

SEQ ID NO: 38640 - protein, 46 aa, Artificial Sequence
  Quasi-synthetic sequence derived from human genome
RIVRALFEIALRKRWPTMTYRLLNLSKVIDKRLWGWASPLRQFSIL

SEQ ID NO: 38641 - protein, 46 aa, Artificial Sequence
  Quasi-synthetic sequence derived from human genome
KCALVRHKFNRLPRVLILHLKRYSFNVALSLNNKIGQQVIIPRYLT

SEQ ID NO: 38642 - protein, 46 aa, Artificial Sequence
  Quasi-synthetic sequence derived from human genome
FKNLFYRTYMLFKNASGKRRFLLCLLLFTVITYFFVVIGIAPIFIL

SEQ ID NO: 38643 - protein, 46 aa, Artificial Sequence
  Quasi-synthetic sequence derived from human genome
PLCRKNQYQTRVIHDGARLFRIKCVTRIQAYWRGCVVRKWYRNLRK

SEQ ID NO: 38644 - protein, 46 aa, Artificial Sequence
  Quasi-synthetic sequence derived from human genome
FVVMRFSLAVLYQACCVALLLWLALLLSIQRRLPRERKIKYSKLLS

SEQ ID NO: 38645 - protein, 46 aa, Artificial Sequence
  Quasi-synthetic sequence derived from human genome
KPGQLINWFICSLCVPRVRKLWSSRRPRTRRNLLLGTACAIYLGFL

SEQ ID NO: 38646 - protein, 46 aa, Artificial Sequence
  Quasi-synthetic sequence derived from human genome
ILISAVLPTAFRVAKKRAPKVLGTTLVVGLLAGVGYFAFMLFRKRL

SEQ ID NO: 38647 - protein, 46 aa, Artificial Sequence
  Quasi-synthetic sequence derived from human genome
IIRYYRRYKVKSYIHEVARRFHGVKTMRDYGKHVKWPSPPKVLRRF

SEQ ID NO: 38648 - protein, 46 aa, Artificial Sequence
  Quasi-synthetic sequence derived from human genome
ALCTLRGRRCHCLPFPKRGMQRWMLPLRRGARLLPLASSKNPRARS

SEQ ID NO: 38649 - protein, 46 aa, Artificial Sequence
  Quasi-synthetic sequence derived from human genome
YIPRKRGKNPMKAVGLAWYSLYTRTWLGYLFYRQQLRRARNRYPKG

SEQ ID NO: 38650 - protein, 46 aa, Artificial Sequence
  Quasi-synthetic sequence derived from human genome
KIFFRAGQVAYLEKLRLDKLRQSCVMVQKHMRGWLQRKKFLRERRA

SEQ ID NO: 38651 - protein, 46 aa, Artificial Sequence
  Quasi-synthetic sequence derived from human genome
RAIRNFHTSPRFQAAPVPLLLMILKPVQKLFAIIVGRGIRKWWQAL

SEQ ID NO: 38652 - protein, 46 aa, Artificial Sequence
  Quasi-synthetic sequence derived from human genome
RWARPFYLAFVFCLALGLLQAIKLYLRRQRLLRDLRPFPAPPTHWF

SEQ ID NO: 38653 - protein, 46 aa, Artificial Sequence
  Quasi-synthetic sequence derived from human genome
PFLLLILLCMSLLLFQVIRLYQRRRWMIRALHLFPAPPAHWFYGHK

SEQ ID NO: 38654 - protein, 46 aa, Artificial Sequence
  Quasi-synthetic sequence derived from human genome
KATTIQKHVRGWMARRHFQRLRDAAIVIQCAFRMLKARRELKALRI

SEQ ID NO: 38655 - protein, 46 aa, Artificial Sequence
  Quasi-synthetic sequence derived from human genome
KNIIRTKMFLYLSDLSRKDRRIVSKKYKIYFWNIITIAVFYALPVI

SEQ ID NO: 38656 - protein, 46 aa, Artificial Sequence
  Quasi-synthetic sequence derived from human genome
IRSRFISHSSSSSWGMARGSIFKAIAHFKRTTFLKKHRMLGRLKYK

SEQ ID NO: 38657 - protein, 46 aa, Artificial Sequence
  Quasi-synthetic sequence derived from human genome
VILLALGALLVLQLIRRRRREHGALWLPPGFTRRPRTQSAPHRRRP

SEQ ID NO: 38658 - protein, 46 aa, Artificial Sequence
  Quasi-synthetic sequence derived from human genome
ARRFRRWLNRYSYTVLSSWPERALISLKNRSRFLVRPNTRNRAFSW

SEQ ID NO: 38659 - protein, 46 aa, Artificial Sequence
  Quasi-synthetic sequence derived from human genome
IKFASYYAGIAVAVLITGYIQICFWVIAAARQIQKMRKFYFRRIMR

SEQ ID NO: 38660 - protein, 46 aa, Artificial Sequence
  Quasi-synthetic sequence derived from human genome
KKKTTFFKRGKKLKCYLMPFGTGTSKCPGRFFALMEIKQLLVILLT

SEQ ID NO: 38661 - protein, 46 aa, Artificial Sequence
  Quasi-synthetic sequence derived from human genome
VATMRKPRCSLPDVLGVAGLVRRRRRYALSGSVWKKRTLTWRVRSF

SEQ ID NO: 38662 - protein, 46 aa, Artificial Sequence
  Quasi-synthetic sequence derived from human genome
WLARTHYKRSMHAIIYLQCCFRRMMAKRELKKLKIEARSVERYKKL

SEQ ID NO: 38663 - protein, 46 aa, Artificial Sequence
  Quasi-synthetic sequence derived from human genome
QKAVRHFLLRKKQEKFTSGIIKIQALWRGYSWRKKNDCTKIKAIRL

SEQ ID NO: 38664 - protein, 46 aa, Artificial Sequence
  Quasi-synthetic sequence derived from human genome
KQPAKKKRKKGLRIKGKRRRKKLILAKKFSKDLGSGRPVADAPALL

SEQ ID NO: 38665 - protein, 46 aa, Artificial Sequence
  Quasi-synthetic sequence derived from human genome
CIMYKVPLIRKKSLRRTLSERGLLKDFLKKHNLNPARKYFPQWKAP

SEQ ID NO: 38666 - protein, 46 aa, Artificial Sequence
  Quasi-synthetic sequence derived from human genome
LAQGKKQRLSKKLRRKLQMWLWSQTFCPVLYAWNDLGSRFWPRYVK

SEQ ID NO: 38667 - protein, 46 aa, Artificial Sequence
  Quasi-synthetic sequence derived from human genome
KDPTRRPRPRRELSLGRKKAPHRLCGRFSRISMKLPRIPLRRQKLP

SEQ ID NO: 38668 - protein, 46 aa, Artificial Sequence
  Quasi-synthetic sequence derived from human genome
PRSFLRDLVETTHLFLKMLERFCRSRGNLVVQNKQKKRRKKKKKVL

SEQ ID NO: 38669 - protein, 46 aa, Artificial Sequence
  Quasi-synthetic sequence derived from human genome
RKRRRQLRASVFALALPLSLGPCWALWVAVPKASATIRGPQRRLLA

SEQ ID NO: 38670 - protein, 46 aa, Artificial Sequence
  Quasi-synthetic sequence derived from human genome
VVFKAKVKRRPEMSRGLLAVRGAFVGASLLFLLVNVLCAVLSHRRR

SEQ ID NO: 38671 - protein, 46 aa, Artificial Sequence
  Quasi-synthetic sequence derived from human genome
MATPPFRLIRKMFSFKVSRWMGLACFRSLAASSPSIRQKKLMHKLQ

SEQ ID NO: 38672 - protein, 46 aa, Artificial Sequence
  Quasi-synthetic sequence derived from human genome
LAFKSYKPEIQNKLLIIKKKAKHKKHKSGKKSVSKKAITKKRKTVI

SEQ ID NO: 38673 - protein, 46 aa, Artificial Sequence
  Quasi-synthetic sequence derived from human genome
LFIWLKMRISKLVPWMILGSLLYVSMICVFHSKYAGFMVPYFLRKF

SEQ ID NO: 38674 - protein, 46 aa, Artificial Sequence
  Quasi-synthetic sequence derived from human genome
FKVAVIASIVSCAIILLMSMAFLTCCLLKCVKKSKRRRSNRSAQLW

SEQ ID NO: 38675 - protein, 46 aa, Artificial Sequence
  Quasi-synthetic sequence derived from human genome
KVVGRCLPTPKCHTPPLYRMRIFAPNHVVAKSRFWYFVSQLKKMKK

SEQ ID NO: 38676 - protein, 46 aa, Artificial Sequence
  Quasi-synthetic sequence derived from human genome
QKRYVAYFAQVKHLYNWNLPPRRILFIKHFIIYSIPRYVRDLKIQI

SEQ ID NO: 38677 - protein, 46 aa, Artificial Sequence
  Quasi-synthetic sequence derived from human genome
MAFRALGVATQTAIAAAIALLALTALLLVAMICRRRRRRKKARGPP

SEQ ID NO: 38678 - protein, 46 aa, Artificial Sequence
  Quasi-synthetic sequence derived from human genome
LRTFRLMRVLKLVRFLPALQRQLVVLMKTMDNVATFCMLLMLFIFI

SEQ ID NO: 38679 - protein, 46 aa, Artificial Sequence
  Quasi-synthetic sequence derived from human genome
IFTLVISLGIFVFFRKLTTIFPLNWKYRKALSLGCQRVTLHKNMFL

SEQ ID NO: 38680 - protein, 46 aa, Artificial Sequence
  Quasi-synthetic sequence derived from human genome
RLVVYKIVYMFLFLLCLTLFQVYYSLWRKLLKAFWWLVVAYTMLVL

SEQ ID NO: 38681 - protein, 46 aa, Artificial Sequence
  Quasi-synthetic sequence derived from human genome
VVRAVYRVLKNCPSVALKKKAKCLLSKWKAVYKQTHSKARNSPKLF

SEQ ID NO: 38682 - protein, 46 aa, Artificial Sequence
  Quasi-synthetic sequence derived from human genome
KTSKPIVHSRKKYRFHKTRSRMTHRTPKVKKSPKVRKKSYLSRLML

SEQ ID NO: 38683 - protein, 46 aa, Artificial Sequence
  Quasi-synthetic sequence derived from human genome
AKIRKALDRLRKKRHLLRRQRTRREFPVISVVGYTNCGKTTLIKAL

SEQ ID NO: 38684 - protein, 46 aa, Artificial Sequence
  Quasi-synthetic sequence derived from human genome
RRTRRPRFVLMNKMDDLNLHYRFLNWRRRIREIREVRAFRYQERFK

SEQ ID NO: 38685 - protein, 46 aa, Artificial Sequence
  Quasi-synthetic sequence derived from human genome
RRRKKKERRPRGTMQAINNERKASKVLGIVFFVFLIMWCPFFITNI

SEQ ID NO: 38686 - protein, 46 aa, Artificial Sequence
  Quasi-synthetic sequence derived from human genome
KRVIGKAGRNRWLGKRPNSGRWHRKGGWAGRKIRPLPPMKSYVKLP

SEQ ID NO: 38687 - protein, 46 aa, Artificial Sequence
  Quasi-synthetic sequence derived from human genome
RDSIRASAVGLLGTLVRRGRGGLRLGLRGPLRKLVLQSLVPLLLRL

SEQ ID NO: 38688 - protein, 46 aa, Artificial Sequence
  Quasi-synthetic sequence derived from human genome
KLVSPKWKNFKGLKLQWRDKIRLNNAIWRAWYMQYLEKRKNPVCHF

SEQ ID NO: 38689 - protein, 46 aa, Artificial Sequence
  Quasi-synthetic sequence derived from human genome
ILIKQVLNWMLRKLSCRCCARCCPAPGAPLARRNAITPGSRLRRRL

SEQ ID NO: 38690 - protein, 46 aa, Artificial Sequence
  Quasi-synthetic sequence derived from human genome
RCVRLLRIFKVTRHWASLSNLVASLLNSMKSIASLLLLLFLFIIIF

SEQ ID NO: 38691 - protein, 46 aa, Artificial Sequence
  Quasi-synthetic sequence derived from human genome
TRPFSGRRLPVRAWADVRRESRLLQLLGRLPLFGLGRLVTRKSWLW

SEQ ID NO: 38692 - protein, 46 aa, Artificial Sequence
  Quasi-synthetic sequence derived from human genome
ILNLFSFLLRIKTSLLHEEVSLVEKKLFEKKYSVKRKKSRSKKVRR

SEQ ID NO: 38693 - protein, 46 aa, Artificial Sequence
  Quasi-synthetic sequence derived from human genome
RQLAVRPSTPHTITLQPSSFRNLRLPKRLRVVYFLARTRLAQRLIM

SEQ ID NO: 38694 - protein, 46 aa, Artificial Sequence
  Quasi-synthetic sequence derived from human genome
LLALLGLVVKRAVERRKALSRRARRLAVRMRALESSQRPRGSPRPR

SEQ ID NO: 38695 - protein, 46 aa, Artificial Sequence
  Quasi-synthetic sequence derived from human genome
LVPPALRGLVRPHKKRKKLSSSCRKAKRAKSQNPLRSFKHKGKKFR

SEQ ID NO: 38696 - protein, 46 aa, Artificial Sequence
  Quasi-synthetic sequence derived from human genome
PKLVKPKKKRRKKSVYTVGLRGLINLGNTCFMNCIVQALTHIPLLK

SEQ ID NO: 38697 - protein, 46 aa, Artificial Sequence
  Quasi-synthetic sequence derived from human genome
KPVQKLFAIIVGRGIRKWWQALPPNKKEVVKENIRKNKWKLFLGLS

SEQ ID NO: 38698 - protein, 46 aa, Artificial Sequence
  Quasi-synthetic sequence derived from human genome
LFQMPLFLKLFICFIFIRSSPTIVSNKRVSKRKFIPPAFTNVSTKF

SEQ ID NO: 38699 - protein, 46 aa, Artificial Sequence
  Quasi-synthetic sequence derived from human genome
LYWKAQRYRLIREFHSRPALAPPFIVISHLRLLLRQLCRRPRSPQP

SEQ ID NO: 38700 - protein, 46 aa, Artificial Sequence
  Quasi-synthetic sequence derived from human genome
VLPKPRMRGLLARRLRNHMAVAFVLSLGVAALYKFRVADQRKKAYA

SEQ ID NO: 38701 - protein, 46 aa, Artificial Sequence
  Quasi-synthetic sequence derived from human genome
ALTFFVAAFHLLFDFLAFKNDISFWKKKKSMIGMSTKLWKVKKALK

SEQ ID NO: 38702 - protein, 46 aa, Artificial Sequence
  Quasi-synthetic sequence derived from human genome
RANRIRSNSSAANLMAKKRVIRMLIVIVVLFFLCWMPIFSANAWRA

SEQ ID NO: 38703 - protein, 46 aa, Artificial Sequence
  Quasi-synthetic sequence derived from human genome
KIFIRSPKTLFYLEEQRRLRLQQLATLIQKIYRGWRCRTHYQLMRK

SEQ ID NO: 38704 - protein, 46 aa, Artificial Sequence
  Quasi-synthetic sequence derived from human genome
KKLLNGLCPKITYLFYKLFTLLSWMLSVVLLLFLNVKIALFLLLFL

SEQ ID NO: 38705 - protein, 46 aa, Artificial Sequence
  Quasi-synthetic sequence derived from human genome
RLKVAITMLTARGIIRFVIGFSLPMSIVAICYGLIAAKIHKKGMIK

SEQ ID NO: 38706 - protein, 46 aa, Artificial Sequence
  Quasi-synthetic sequence derived from human genome
RPAANVARKFASIARNQVRKKRQMAARERKVTRTIFAILLAFILTW

SEQ ID NO: 38707 - protein, 46 aa, Artificial Sequence
  Quasi-synthetic sequence derived from human genome
VSACIPVFRLARRRKKILFYCHFPDLLLTKRDSFLKRLYRAPIDWI

SEQ ID NO: 38708 - protein, 46 aa, Artificial Sequence
  Quasi-synthetic sequence derived from human genome
IVGMFLAELIEKYFVSPTLFRVIRLARIGRILRLIKGAKGIRTLLF

SEQ ID NO: 38709 - protein, 46 aa, Artificial Sequence
  Quasi-synthetic sequence derived from human genome
KMNILGLLIPFTIFMFCYIKILHQLKRCQNHNKTKAIRLVLIVVIA

SEQ ID NO: 38710 - protein, 46 aa, Artificial Sequence
  Quasi-synthetic sequence derived from human genome
MPTPLLPLLLRLLLSCLLLPAARLARQYLLPLLRRLARRLGSQDMR

SEQ ID NO: 38711 - protein, 46 aa, Artificial Sequence
  Quasi-synthetic sequence derived from human genome
LIRKPRIVSRGRRPRSQQYSVLFKQLGVNTVRKCYKCNICGKIFLH

SEQ ID NO: 38712 - protein, 46 aa, Artificial Sequence
  Quasi-synthetic sequence derived from human genome
MGQIVLAKKMLRKALKLLNRIFPYNLISLFLHIHVEKNRHFHYVNR

SEQ ID NO: 38713 - protein, 46 aa, Artificial Sequence
  Quasi-synthetic sequence derived from human genome
FRNLRLPKRLRVVYFLARTRLAQRLIMAGTVVWIGILVYTDPAGLR

SEQ ID NO: 38714 - protein, 46 aa, Artificial Sequence
  Quasi-synthetic sequence derived from human genome
MKICVFIFAFVIPVLIIIVCYTLMILRLKSVRLLSGSREKDRNLRR

SEQ ID NO: 38715 - protein, 46 aa, Artificial Sequence
  Quasi-synthetic sequence derived from human genome
PVIERIPRLRRQKKIFSKQQGKAFQRARQMNIDVATWVRLLRRLIP

SEQ ID NO: 38716 - protein, 46 aa, Artificial Sequence
  Quasi-synthetic sequence derived from human genome
FLSKNFQKHMYYNRDWYKRNFAITFFMGKVALERIWNKLKQKQKKR

SEQ ID NO: 38717 - protein, 46 aa, Artificial Sequence
  Quasi-synthetic sequence derived from human genome
LSVERYLAICRPLRARVLVTRRRVRALIAVLWAVALLSAGPFLFLV

SEQ ID NO: 38718 - protein, 46 aa, Artificial Sequence
  Quasi-synthetic sequence derived from human genome
MLQWRRRHCCFAKMTWNAKRSLFRTHLIGVLSLVFLFAMFLFFNHH

SEQ ID NO: 38719 - protein, 46 aa, Artificial Sequence
  Quasi-synthetic sequence derived from human genome
ARRTAVIVQQKLRSSLLTKKQDQAARKIMRFLRRCRHRVKELKKAK

SEQ ID NO: 38720 - protein, 46 aa, Artificial Sequence
  Quasi-synthetic sequence derived from human genome
FGRRVLCYPLYRHFKLVMKAYRDTIKILQLGKSAVLKCLLDIHKIF

SEQ ID NO: 38721 - protein, 46 aa, Artificial Sequence
  Quasi-synthetic sequence derived from human genome
MMRFMLLFSRQGKLRLQKWYLATSDKERKKMVRELMQVVLARKPKM

SEQ ID NO: 38722 - protein, 46 aa, Artificial Sequence
  Quasi-synthetic sequence derived from human genome
LKIKLAVRMDKPQNMKHSGYLWAIGKNVWKRWKKRFFVLVQVSQYT

SEQ ID NO: 38723 - protein, 46 aa, Artificial Sequence
  Quasi-synthetic sequence derived from human genome
NFLGFLLPLLIMSYCYFRIIQTLFSCKNHKKAKAIKLILLVVIVFF

SEQ ID NO: 38724 - protein, 46 aa, Artificial Sequence
  Quasi-synthetic sequence derived from human genome
MLCAISLCARVRKLRSAGRCGKFHQVRRVMTILFLTMVISYFGCMK

SEQ ID NO: 38725 - protein, 46 aa, Artificial Sequence
  Quasi-synthetic sequence derived from human genome
RLVALKKFVAVLAKYFPGRPLVQNFLHSVNEWLKRQKRNKIPYSFF

SEQ ID NO: 38726 - protein, 46 aa, Artificial Sequence
  Quasi-synthetic sequence derived from human genome
VRSLLRLLAAAAACGAFAFLGYCIYLNRKRRGDPAFKRRLRDKRRA

SEQ ID NO: 38727 - protein, 46 aa, Artificial Sequence
  Quasi-synthetic sequence derived from human genome
LMKKSQIVIAAWYRRYAQQKRYQQTKSSALVIQSYIRGWKARKILR

SEQ ID NO: 38728 - protein, 46 aa, Artificial Sequence
  Quasi-synthetic sequence derived from human genome
KRRPKRREIPLKVLVKAVLFACMLMRKTMASRVRVTILFATETGKS

SEQ ID NO: 38729 - protein, 46 aa, Artificial Sequence
  Quasi-synthetic sequence derived from human genome
RHVPLRRVHLFTFLQVLCLALLWILKSTVAAIIFPVMILALVAVRK

SEQ ID NO: 38730 - protein, 46 aa, Artificial Sequence
  Quasi-synthetic sequence derived from human genome
LTSWLRVRFGTWNWIWRRCCRAASAAVLAPLGFTLRKPPAVGRNRR

SEQ ID NO: 38731 - protein, 46 aa, Artificial Sequence
  Quasi-synthetic sequence derived from human genome
KTFLSYARTSIRASLTFNRGFKAGRNMRRKLFGVLRLKCHSLFLDL

SEQ ID NO: 38732 - protein, 46 aa, Artificial Sequence
  Quasi-synthetic sequence derived from human genome
IVGMFLADIIEKYFVSPTLFRVIRLARIGRILRLIKGAKGIRTLLF

SEQ ID NO: 38733 - protein, 46 aa, Artificial Sequence
  Quasi-synthetic sequence derived from human genome
RRKKRLRHRVPPRKPEPLVKLHRTALHWACLKGHSQLVNKLLVAGA

SEQ ID NO: 38734 - protein, 46 aa, Artificial Sequence
  Quasi-synthetic sequence derived from human genome
RGKDPTRRELSLGRKKAPHRLCGRFSRISMKLPRIPLRRQKLPKVV

SEQ ID NO: 38735 - protein, 46 aa, Artificial Sequence
  Quasi-synthetic sequence derived from human genome
LQLLVFTALAILIMRLKMFLTPHMCVMASLICSRQLFGWLFRRVRF

SEQ ID NO: 38736 - protein, 46 aa, Artificial Sequence
  Quasi-synthetic sequence derived from human genome
RIPRPLIMIRAFRIYFRFELPRTRITNILKRSGEQIWSVSIFLLFF

SEQ ID NO: 38737 - protein, 46 aa, Artificial Sequence
  Quasi-synthetic sequence derived from human genome
LAARRQEQRATVRALWFWAFSLQAKVWATWLAFVLERRRKKARLQW

SEQ ID NO: 38738 - protein, 46 aa, Artificial Sequence
  Quasi-synthetic sequence derived from human genome
VRVQRRPLKNRTDFLVPLLSSVLTVAWICCLVTAFYWCLRKRRKPG

SEQ ID NO: 38739 - protein, 46 aa, Artificial Sequence
  Quasi-synthetic sequence derived from human genome
RPHLPGKKKIRWDPVRRRFIQSCPIIRIPNRFLRGHRPPPARSGHR

SEQ ID NO: 38740 - protein, 46 aa, Artificial Sequence
  Quasi-synthetic sequence derived from human genome
CSILFLTCISVHRCLGVLRPLRSLRWGRARYARRVAGAVWVLVLAC

SEQ ID NO: 38741 - protein, 46 aa, Artificial Sequence
  Quasi-synthetic sequence derived from human genome
FFGLYFLVVALPYANSCANPILYGFLSYRFKQGFRRVLLRPSRRVR

SEQ ID NO: 38742 - protein, 46 aa, Artificial Sequence
  Quasi-synthetic sequence derived from human genome
RRVATWFNQPARKIRRRKARQAKARRIAPRPASGPIRPIVRCPTVR

SEQ ID NO: 38743 - protein, 46 aa, Artificial Sequence
  Quasi-synthetic sequence derived from human genome
GRMEWIIPLIVVSALTFVCLILLIAVLVYWRGCNKIKSKGFPRRFR

SEQ ID NO: 38744 - protein, 46 aa, Artificial Sequence
  Quasi-synthetic sequence derived from human genome
FRCVRLLRIFKVTRHWTSLSNLVASLLNSMKSIASLLLLLFLFIII

SEQ ID NO: 38745 - protein, 46 aa, Artificial Sequence
  Quasi-synthetic sequence derived from human genome
LFSLMDMKPPISRAKMILITKAAIKAIKLYKHVVQIVEKFIKKCKP

SEQ ID NO: 38746 - protein, 46 aa, Artificial Sequence
  Quasi-synthetic sequence derived from human genome
FFILRRKPVEQKKIFTIQGCYPVIRCLLRRRGWVEKKMVHRSGPTL

SEQ ID NO: 38747 - protein, 46 aa, Artificial Sequence
  Quasi-synthetic sequence derived from human genome
IIVYKLRRKSNFRLRGYSTGKTTAILFTITSIFATLWAPRIIMILY

SEQ ID NO: 38748 - protein, 46 aa, Artificial Sequence
  Quasi-synthetic sequence derived from human genome
RLRMVWRRKRKPAGRQQPNPLPHLWRRTPQTRRKSLAYAHIFSPNL

SEQ ID NO: 38749 - protein, 46 aa, Artificial Sequence
  Quasi-synthetic sequence derived from human genome
NEGLKMLVTISCILVGVLLLFVLLLVVRRRRREQRLKRLRDAKSLA

SEQ ID NO: 38750 - protein, 46 aa, Artificial Sequence
  Quasi-synthetic sequence derived from human genome
RTALRVLQLVAGFLLPLLVMAYCYAHILAVLLVSRGQRRLRAMRLV

SEQ ID NO: 38751 - protein, 46 aa, Artificial Sequence
  Quasi-synthetic sequence derived from human genome
KIFPCDKYVKVFHKFLNANRHKTRHTGKKPFKCKKCGKSFCMLLHL

SEQ ID NO: 38752 - protein, 46 aa, Artificial Sequence
  Quasi-synthetic sequence derived from human genome
IIKMTRILTAFKVVRTLKTGFGFTNVTAHQKWKFSRPGIRLLSVKA

SEQ ID NO: 38753 - protein, 46 aa, Artificial Sequence
  Quasi-synthetic sequence derived from human genome
RFGRNVPRYIHILLANLYVVVPPMLNPVIYGVRTKQIYKCVKKILL

SEQ ID NO: 38754 - protein, 46 aa, Artificial Sequence
  Quasi-synthetic sequence derived from human genome
AVMIPQNVHRILINLMKYLQKWKRYRPLWKLDKAIVMEKFAAKKPP

SEQ ID NO: 38755 - protein, 46 aa, Artificial Sequence
  Quasi-synthetic sequence derived from human genome
MFTRAQVRRILQRVPGKQRFGIYRFLPFFFVLGGTMEWIMIKVRVG

SEQ ID NO: 38756 - protein, 46 aa, Artificial Sequence
  Quasi-synthetic sequence derived from human genome
FRKERIEGLRKRRRLLSIIVVLVVTFALCWMPYHLVKTLYMLGSLL

SEQ ID NO: 38757 - protein, 46 aa, Artificial Sequence
  Quasi-synthetic sequence derived from human genome
LVARIQATYKRCLGRREYVKKRQAAIKLEAHWRGALARKAIQRRKW

SEQ ID NO: 38758 - protein, 46 aa, Artificial Sequence
  Quasi-synthetic sequence derived from human genome
LKSLKFSLFIVCTVTLTLFLMTILTVTKFRGFCFICYKTAQRLVFK

SEQ ID NO: 38759 - protein, 46 aa, Artificial Sequence
  Quasi-synthetic sequence derived from human genome
RRLRRPPHVGRARRNSLRIIFAIESTFVGSWLPFSALRAVFHLARL

SEQ ID NO: 38760 - protein, 46 aa, Artificial Sequence
  Quasi-synthetic sequence derived from human genome
RYLAIVHATRTLTQKRYLVKFICLSIWGLSLLLALPVLLFRRTVYS

SEQ ID NO: 38761 - protein, 46 aa, Artificial Sequence
  Quasi-synthetic sequence derived from human genome
KKSKVHYHVAVIINYLGHCISLVALLVAFVLFLRLRSIRCLRNIIH

SEQ ID NO: 38762 - protein, 46 aa, Artificial Sequence
  Quasi-synthetic sequence derived from human genome
RLLYPRQEVVQATLVVLALAMVPILLLGTPLHLLHRHRRRLRRRPA

SEQ ID NO: 38763 - protein, 46 aa, Artificial Sequence
  Quasi-synthetic sequence derived from human genome
KLSRALRYYYNKRILHKTKGKRFTYKFNFNKLVLVNYPFIDVGLAG

SEQ ID NO: 38764 - protein, 46 aa, Artificial Sequence
  Quasi-synthetic sequence derived from human genome
SQRLLFRIGYSLYTRTWLGYLFYRQQLRRARNRYPKGHSKTQPRLF

SEQ ID NO: 38765 - protein, 46 aa, Artificial Sequence
  Quasi-synthetic sequence derived from human genome
LYQKRVLTITGICIALLVVGIMCVVAYCKTKKQRKKLHDRLRQSLR

SEQ ID NO: 38766 - protein, 46 aa, Artificial Sequence
  Quasi-synthetic sequence derived from human genome
KFMVLLWKNFILKRRRCIALVVEMVLTFLFSAALLATRSVITINKN

SEQ ID NO: 38767 - protein, 46 aa, Artificial Sequence
  Quasi-synthetic sequence derived from human genome
RCRLNRLRRAACRLFTSEKMVKAIKKLEIEIEARRLIVRKDRHLWK

SEQ ID NO: 38768 - protein, 46 aa, Artificial Sequence
  Quasi-synthetic sequence derived from human genome
RYLAIVHPMKSRLRRTMLVAKVTCIIIWLLAGLASLPAIIHRNVFF

SEQ ID NO: 38769 - protein, 46 aa, Artificial Sequence
  Quasi-synthetic sequence derived from human genome
ITRPLTYRAKRTPKRAGIMIGLAWLISFILWAPAILCWQYLVGKRT

SEQ ID NO: 38770 - protein, 46 aa, Artificial Sequence
  Quasi-synthetic sequence derived from human genome
RSSVHARWIVGKVIGTKMQKTAKVRVTRLVLDPYLLKYFNKRKTYF

SEQ ID NO: 38771 - protein, 46 aa, Artificial Sequence
  Quasi-synthetic sequence derived from human genome
LTKPVTLSRSKINKTKVLKMIFVHLIIFCFCFVPYNINLILYSLVR

SEQ ID NO: 38772 - protein, 46 aa, Artificial Sequence
  Quasi-synthetic sequence derived from human genome
HHQRPKRYFTIVIISSSLLLGLIVLLLISYVMWKAGFFKRQYKSIL

SEQ ID NO: 38773 - protein, 46 aa, Artificial Sequence
  Quasi-synthetic sequence derived from human genome
RSRKDFKRYLLNFIAAMPLISLVNNFLKYGLNELKLCFRVRLTKYL

SEQ ID NO: 38774 - protein, 46 aa, Artificial Sequence
  Quasi-synthetic sequence derived from human genome
YLKSNWLGLRFLRALRLLELPQILQILRAIKTSNSVKFSKLLSIIL

SEQ ID NO: 38775 - protein, 46 aa, Artificial Sequence
  Quasi-synthetic sequence derived from human genome
RLGIHLIRRKIVKPKHHVLMSRKESWKVKSEIPKVPKQPLVLHHPR

SEQ ID NO: 38776 - protein, 46 aa, Artificial Sequence
  Quasi-synthetic sequence derived from human genome
RSVFHGAIMSVFPVVMYFWKRFCFWKATRSYLQYRGKKFKDRKSPP

SEQ ID NO: 38777 - protein, 46 aa, Artificial Sequence
  Quasi-synthetic sequence derived from human genome
ALAVIRGGATRAAGVFYPWRFRLLCLLRRWLPRPRAWFIRQELNVT

SEQ ID NO: 38778 - protein, 46 aa, Artificial Sequence
  Quasi-synthetic sequence derived from human genome
RRRIPRTPALCTPLALPAPTTRRRQSPWTRFQWRRRAWAAPLWPPR

SEQ ID NO: 38779 - protein, 46 aa, Artificial Sequence
  Quasi-synthetic sequence derived from human genome
KGQKKKKIVKYGMGGLIILFLIAIIWFPLLFMSLVRSVVGVVNQPI

SEQ ID NO: 38780 - protein, 46 aa, Artificial Sequence
  Quasi-synthetic sequence derived from human genome
HGKRLFVIRPSRFYDRRFLKLLRFYIALTGIPVAIFITLVNVFIGQ

SEQ ID NO: 38781 - protein, 46 aa, Artificial Sequence
  Quasi-synthetic sequence derived from human genome
VVIPLKVISRGRSAKAPGWLSYSLRFGGQKHVVHMRVKKLLVSRHL

SEQ ID NO: 38782 - protein, 46 aa, Artificial Sequence
  Quasi-synthetic sequence derived from human genome
RNHKTFMVLNRKRTIYRFSAKHALFIFGPFNSIRSLAIRVSVHSLF

SEQ ID NO: 38783 - protein, 46 aa, Artificial Sequence
  Quasi-synthetic sequence derived from human genome
RYLALVHPLRARALRGRRLALGLCMAAWLMAAALALPLTLQRQTFR

SEQ ID NO: 38784 - protein, 46 aa, Artificial Sequence
  Quasi-synthetic sequence derived from human genome
LTRKGARALAAKALARRRAYRRLNRTVAELVQFLLVKDKKKSPITR

SEQ ID NO: 38785 - protein, 46 aa, Artificial Sequence
  Quasi-synthetic sequence derived from human genome
KLYQFLHLRKAAITIQSSYRRLMVKKKLQEMQRAAVLIQATFRMYR

SEQ ID NO: 38786 - protein, 46 aa, Artificial Sequence
  Quasi-synthetic sequence derived from human genome
LIKFRAHRVVKRKSALGPGVPHIINTKLLKHFTCLTYNNGRLRNLI

SEQ ID NO: 38787 - protein, 46 aa, Artificial Sequence
  Quasi-synthetic sequence derived from human genome
PKLSKFILISSLAILLMVSLLLLSLWKLWRVKKFLIPSVPDPKSIF

SEQ ID NO: 38788 - protein, 46 aa, Artificial Sequence
  Quasi-synthetic sequence derived from human genome
RKRKCDLRAVRVGLLLGGGGVYGSRFRFTFPGCRALSPWRVRVQRR

SEQ ID NO: 38789 - protein, 46 aa, Artificial Sequence
  Quasi-synthetic sequence derived from human genome
ALILCLLVVRFDPASPSSLHFLYKLAQLFRWIRKAAFSRLYQLRIR

SEQ ID NO: 38790 - protein, 46 aa, Artificial Sequence
  Quasi-synthetic sequence derived from human genome
KVQRIFTRRSKKLAVVHFFDHASAALARKKGKSLHKDMAIFWHRKK

SEQ ID NO: 38791 - protein, 46 aa, Artificial Sequence
  Quasi-synthetic sequence derived from human genome
RGHRKRSRRVLYPRVVRRQLPVEEPNPAKRLLFLLLTIVFCQILMA

SEQ ID NO: 38792 - protein, 46 aa, Artificial Sequence
  Quasi-synthetic sequence derived from human genome
KTSKPIVHARKKYRFHKTRSHVTHRTPKVKKSPKVRKKSYLSRLML

SEQ ID NO: 38793 - protein, 46 aa, Artificial Sequence
  Quasi-synthetic sequence derived from human genome
PKRYPGWVILVGTGALGLLLLFLLGYGWAAACAGARKKRRSPPRKR

SEQ ID NO: 38794 - protein, 46 aa, Artificial Sequence
  Quasi-synthetic sequence derived from human genome
RQRPSPRPTPRRPRPRLARPRAGQKPWLLVIRSMERVMYVMLIIQM

SEQ ID NO: 38795 - protein, 46 aa, Artificial Sequence
  Quasi-synthetic sequence derived from human genome
LVSAGVVILLIISSILGSVWLAYKTPKLLRTARGRRIKKCATQLCR

SEQ ID NO: 38796 - protein, 46 aa, Artificial Sequence
  Quasi-synthetic sequence derived from human genome
VARSLALALLCLVLSTCVGPYLFPYFIPLNGDRLLRNKKRKARWLR

SEQ ID NO: 38797 - protein, 46 aa, Artificial Sequence
  Quasi-synthetic sequence derived from human genome
KATKRCKKLEAVYKEFELQKVCYLPLNTFLLKPIQRLLHYRLLLRR

SEQ ID NO: 38798 - protein, 46 aa, Artificial Sequence
  Quasi-synthetic sequence derived from human genome
KILRVLRVLRPLRAINRAKGLKHVVQCMFVAISTIGNIVLVTTLLQ

SEQ ID NO: 38799 - protein, 46 aa, Artificial Sequence
  Quasi-synthetic sequence derived from human genome
KWLLLLGLVALSECIMYKVPLIRKKSLRRTLSERGLLKDFLKKHNL

SEQ ID NO: 38800 - protein, 46 aa, Artificial Sequence
  Quasi-synthetic sequence derived from human genome
LIPKFARWFSVPWKVIFVFALLAFLFFTSWYSSYGFTRRWNCILMR

SEQ ID NO: 38801 - protein, 46 aa, Artificial Sequence
  Quasi-synthetic sequence derived from human genome
ARGACRIYNSTYLGRAFFGLKVALIFPVLVLLTVFIFVVRKKSHGK

SEQ ID NO: 38802 - protein, 46 aa, Artificial Sequence
  Quasi-synthetic sequence derived from human genome
RKIVKMTKQPAKKKPPPSREKKVTRTILAILLAFIITWAPYNVMVL

SEQ ID NO: 38803 - protein, 46 aa, Artificial Sequence
  Quasi-synthetic sequence derived from human genome
VRLILMTYFKVINQMLVFFAAKNFLVVVLQLYRLVVLALAVRASLR

SEQ ID NO: 38804 - protein, 46 aa, Artificial Sequence
  Quasi-synthetic sequence derived from human genome
KHPQRKLFQEIFTALVKNRLISREWVNRAPSIHFLRVLICLRLLMR

SEQ ID NO: 38805 - protein, 46 aa, Artificial Sequence
  Quasi-synthetic sequence derived from human genome
RRKPTCKKIMTVLTVGIFWPVLSLCYLIAPKSQFGRIIHTPFMKFI

SEQ ID NO: 38806 - protein, 46 aa, Artificial Sequence
  Quasi-synthetic sequence derived from human genome
QLKAKRKVVKMMIIVVMTFAICWLPYHIYFILTAIYQQLNRWKYIQ

SEQ ID NO: 38807 - protein, 46 aa, Artificial Sequence
  Quasi-synthetic sequence derived from human genome
RIARILAGSKKKICTRKPRFMSAWAQVIIASILISVQLTLVVTLII

SEQ ID NO: 38808 - protein, 46 aa, Artificial Sequence
  Quasi-synthetic sequence derived from human genome
VKGLQLPTPVWFHVLFYLAVGIMFLVNTVLWVTIRKELKRKKKWNL

SEQ ID NO: 38809 - protein, 46 aa, Artificial Sequence
  Quasi-synthetic sequence derived from human genome
VKRTITRQQWKKKALRSMPKSRNQVLFRRNLTPSQLRTLAPPYMLL

SEQ ID NO: 38810 - protein, 46 aa, Artificial Sequence
  Quasi-synthetic sequence derived from human genome
LRLCRPYRLAAGVKFRVLRHEAGRPLRLLMQINPLPYSRVVHTYRL

SEQ ID NO: 38811 - protein, 46 aa, Artificial Sequence
  Quasi-synthetic sequence derived from human genome
INNIKHITSKINAILAHNSPVLIVQRWIRGFLVRKNLSPVFFHKKK

SEQ ID NO: 38812 - protein, 46 aa, Artificial Sequence
  Quasi-synthetic sequence derived from human genome
IIHRLRRRGRSGLQPRVGKSTAILLGITTLFTLLWAPRVFVMLYHM

SEQ ID NO: 38813 - protein, 46 aa, Artificial Sequence
  Quasi-synthetic sequence derived from human genome
PHLLTLFHRLCKLLFFRIRPIFVFDGDAPLLKKQTLVKRRQRKDLA

SEQ ID NO: 38814 - protein, 46 aa, Artificial Sequence
  Quasi-synthetic sequence derived from human genome
LNLKKTAIKIQSVYRGIRVRRHIQHMHRAATFIKAMFKMHQSRISY

SEQ ID NO: 38815 - protein, 46 aa, Artificial Sequence
  Quasi-synthetic sequence derived from human genome
VMVQKHMRGWLQRKKFLRERRAALIIQQYFRGQQTVRKAITAVALK

SEQ ID NO: 38816 - protein, 46 aa, Artificial Sequence
  Quasi-synthetic sequence derived from human genome
SIAIIVPLVLLVTLITTLVIGLVLCKRKRRTKTIRRQPIINGGINV

SEQ ID NO: 38817 - protein, 46 aa, Artificial Sequence
  Quasi-synthetic sequence derived from human genome
KGGHARSKNWRLSVRCGGWPLRWLMENGFLPDPPRIRYRKKKRILK

SEQ ID NO: 38818 - protein, 46 aa, Artificial Sequence
  Quasi-synthetic sequence derived from human genome
KRVGRRHYCLVEHPQRSKKAVWHKLLSKQRKRAVVACFRMAPLYNL

SEQ ID NO: 38819 - protein, 46 aa, Artificial Sequence
  Quasi-synthetic sequence derived from human genome
RFVKWPRYIRLQRQRAILYKRLKVPPAINQFTQALDRQTATQLLKL

SEQ ID NO: 38820 - protein, 46 aa, Artificial Sequence
  Quasi-synthetic sequence derived from human genome
ALLVLLLVALSALFLGRWLVVRLATKWCQRKLQAELKIGSFRFFWI

SEQ ID NO: 38821 - protein, 46 aa, Artificial Sequence
  Quasi-synthetic sequence derived from human genome
RGRALGGRAVRSRRAIAVLSRWPAFPAFRAFLTFLYRYSVSGPHRL

SEQ ID NO: 38822 - protein, 46 aa, Artificial Sequence
  Quasi-synthetic sequence derived from human genome
YACRLASHCLAYANSCLNPLVYALASRHFRARFRRLWPCGRRRRHR

SEQ ID NO: 38823 - protein, 46 aa, Artificial Sequence
  Quasi-synthetic sequence derived from human genome
NAVIKIQSSYRRWMIRKRMREMHRAATFIQSTFRMHRLHMRYQALK

SEQ ID NO: 38824 - protein, 46 aa, Artificial Sequence
  Quasi-synthetic sequence derived from human genome
FYVSSTINPILYNLVSANFRHIFLATLACLCPVWRRRRKRPAFSRK

SEQ ID NO: 38825 - protein, 46 aa, Artificial Sequence
  Quasi-synthetic sequence derived from human genome
LARFLLKRGLRNKRIGHFLFWFLRSEIAQSRHYQQRFAVILEAYLR

SEQ ID NO: 38826 - protein, 46 aa, Artificial Sequence
  Quasi-synthetic sequence derived from human genome
RTIYTTFLLLFQYCLPLGFILVCYARIYRRLQRQGRVFHKGTYSLR

SEQ ID NO: 38827 - protein, 46 aa, Artificial Sequence
  Quasi-synthetic sequence derived from human genome
RFSPPRRMLPPPPMWRRSPPRMRRRSRSPRRRSPVRRRSRSPGRRR

SEQ ID NO: 38828 - protein, 46 aa, Artificial Sequence
  Quasi-synthetic sequence derived from human genome
RPWKRAAILNYTKGLYFQAFGGRRRCLSKSVAPLLAHGYRRFLPTK

SEQ ID NO: 38829 - protein, 46 aa, Artificial Sequence
  Quasi-synthetic sequence derived from human genome
LTRKGIVRVVFFPFFFRWWLQVTSKVIFFWLLVLYLLQVAAIVLFC

SEQ ID NO: 38830 - protein, 46 aa, Artificial Sequence
  Quasi-synthetic sequence derived from human genome
KSKIKSKYASYLSFIKILLKRGGVKVSTKNLIKLFQIIEQFCPWFP

SEQ ID NO: 38831 - protein, 46 aa, Artificial Sequence
  Quasi-synthetic sequence derived from human genome
LWLVLVAVGAGLLLLGLIILLLWKCDFFKRTRYYQIMPKYHAVRIR

SEQ ID NO: 38832 - protein, 46 aa, Artificial Sequence
  Quasi-synthetic sequence derived from human genome
RLKKHRWYKKILKSRDPIIFSVGWRRFQTIPLYYIEDHNGRQRLLK

SEQ ID NO: 38833 - protein, 46 aa, Artificial Sequence
  Quasi-synthetic sequence derived from human genome
HRLKSYMKFLFVREPFERLVSAYRNKFTQKYNISFHKRYGTKIIKR

SEQ ID NO: 38834 - protein, 46 aa, Artificial Sequence
  Quasi-synthetic sequence derived from human genome
VLRCLRPLRIFKLVPQMRKVVRELFSGFKEIFLVSILLLTLMLVFA

SEQ ID NO: 38835 - protein, 46 aa, Artificial Sequence
  Quasi-synthetic sequence derived from human genome
CIFLFSFIVPVLVISVCYSLMIRRLRGVRLLSGSREKDRNLRRITR

SEQ ID NO: 38836 - protein, 46 aa, Artificial Sequence
  Quasi-synthetic sequence derived from human genome
RLKLLLMPLKHQPDFIYLRHVPLRRVHLFTFLQVLCLALLWILKST

SEQ ID NO: 38837 - protein, 46 aa, Artificial Sequence
  Quasi-synthetic sequence derived from human genome
RKPLSGRTPRLVYKWFLLIYKLSYAFGVVGYLAIMFTMCGFNLFFK

SEQ ID NO: 38838 - protein, 46 aa, Artificial Sequence
  Quasi-synthetic sequence derived from human genome
LKNIYLPHVMLLAKIKMRIGHTVAKQVYYKNKRKDPSKWLPALHLF

SEQ ID NO: 38839 - protein, 46 aa, Artificial Sequence
  Quasi-synthetic sequence derived from human genome
LMAFLIMVVVYLRIYVYVKRKTNVLSPHTSGSISRRRTPMKLMKTV

SEQ ID NO: 38840 - protein, 46 aa, Artificial Sequence
  Quasi-synthetic sequence derived from human genome
AVIQRCYRKYKQLTWIALKFALYKKMTQAAILIQSKFRSYYEQKRF

SEQ ID NO: 38841 - protein, 46 aa, Artificial Sequence
  Quasi-synthetic sequence derived from human genome
LFWVILVLVVVVGSSAFLLCHRRACRKRIRQKLHLCYPVQTSQPKL

SEQ ID NO: 38842 - protein, 46 aa, Artificial Sequence
  Quasi-synthetic sequence derived from human genome
LRIRRLLRPFFLLQNSSMMKKTLKCIRWSLPEMASVGLLLAIHLCL

SEQ ID NO: 38843 - protein, 46 aa, Artificial Sequence
  Quasi-synthetic sequence derived from human genome
LLAILPYYVTIFLTESNKSVLQFQNVRRVVQIFRIMRILRILKLAR

SEQ ID NO: 38844 - protein, 46 aa, Artificial Sequence
  Quasi-synthetic sequence derived from human genome
KLKSAVLTLKVILGFFLPFVVMACCYTIIIHTLIQAKKSSKHKALK

SEQ ID NO: 38845 - protein, 46 aa, Artificial Sequence
  Quasi-synthetic sequence derived from human genome
RLWKARVLKLVLKTAKDSRLGLNSKWLSLKLGDAGNPRSLAIRFIL

SEQ ID NO: 38846 - protein, 46 aa, Artificial Sequence
  Quasi-synthetic sequence derived from human genome
LLFLPLLVNLCCPYFFQDIGYFLKVAAVGRRVRSYGKRRPARTILR

SEQ ID NO: 38847 - protein, 46 aa, Artificial Sequence
  Quasi-synthetic sequence derived from human genome
LKNRTLDEYLTYLLLWVKQRKDLLHLCCKKLKILGMPFRNIRSILK

SEQ ID NO: 38848 - protein, 46 aa, Artificial Sequence
  Quasi-synthetic sequence derived from human genome
AMFAKTWRVHAIFKNVKMKKKIIKDQKLLVIVGGMLLIDLCILICW

SEQ ID NO: 38849 - protein, 46 aa, Artificial Sequence
  Quasi-synthetic sequence derived from human genome
FVIQLQARLRGFLVRQKFAEHSHFLRTWLPAVIKIQAHWRGYRQRK

SEQ ID NO: 38850 - protein, 46 aa, Artificial Sequence
  Quasi-synthetic sequence derived from human genome
RCWRFRGPKPVWGLPQLCRAGGLPRHPDAALFFPPLRRLILFKGAR

SEQ ID NO: 38851 - protein, 46 aa, Artificial Sequence
  Quasi-synthetic sequence derived from human genome
VKKAKAKSRIKMKKARKILAEKRAAAPVVSVPCIPPHRLSKITNRL

SEQ ID NO: 38852 - protein, 46 aa, Artificial Sequence
  Quasi-synthetic sequence derived from human genome
RPTEFAVRSGLLTVMVWVSSIFFFLPVFCLTVLYSLIGRKLWRRRR

SEQ ID NO: 38853 - protein, 46 aa, Artificial Sequence
  Quasi-synthetic sequence derived from human genome
KLFTRREHVKRHSLVHKKDKKYKCMVCKKIFMLAASVGIRHGSRRY

SEQ ID NO: 38854 - protein, 46 aa, Artificial Sequence
  Quasi-synthetic sequence derived from human genome
PKTSFNWFVNPLKTFVFFIWRRYWRTLVLLLLVLLTVFLLLVFYTI

SEQ ID NO: 38855 - protein, 46 aa, Artificial Sequence
  Quasi-synthetic sequence derived from human genome
LAVARPFVSQKLRTKAMARRVLAGIWVLSFLLATPVLAYRTVVPWK

SEQ ID NO: 38856 - protein, 46 aa, Artificial Sequence
  Quasi-synthetic sequence derived from human genome
RRKKKSRMTFFVTQLAITEKQARVLIVIAWSLSFLFSIPTLIIFGK

SEQ ID NO: 38857 - protein, 46 aa, Artificial Sequence
  Quasi-synthetic sequence derived from human genome
CRRTRSGVGWKRVLRSLCHSRTRVPLLAAIYFLMIHVLLILCFTGH

SEQ ID NO: 38858 - protein, 46 aa, Artificial Sequence
  Quasi-synthetic sequence derived from human genome
KTRLKKILKESRQRHLENFRIRAKHLAANWNRIRTSRRTIIHIPSL

SEQ ID NO: 38859 - protein, 46 aa, Artificial Sequence
  Quasi-synthetic sequence derived from human genome
RYPIWLITPQTYLIIWVITNCVSTMLLLWTFLLQRRFVKKRGKTGL

SEQ ID NO: 38860 - protein, 46 aa, Artificial Sequence
  Quasi-synthetic sequence derived from human genome
KALRAFRVLRPLRLVSGVPSLHIVLNSIMKALVPLLHIALLVLFVI

SEQ ID NO: 38861 - protein, 46 aa, Artificial Sequence
  Quasi-synthetic sequence derived from human genome
IFVFFRKLTTIFPLNWKYRKALSLGCQRVTLHKNMFLTYILNSMII

SEQ ID NO: 38862 - protein, 46 aa, Artificial Sequence
  Quasi-synthetic sequence derived from human genome
KHSRKVNPSTKYLVISLVILSFLFLLSVIVIFIIHVYQKIKYREKF

SEQ ID NO: 38863 - protein, 46 aa, Artificial Sequence
  Quasi-synthetic sequence derived from human genome
KVCRGYLVKMGGKIKSWKKRWFVFDRLKRTLSYYVDKHETKLKGVI

SEQ ID NO: 38864 - protein, 46 aa, Artificial Sequence
  Quasi-synthetic sequence derived from human genome
RYLAVVHPIKSAKWRRPRTAKMITMAVWGVSLLVILPIMIYAGLRS

SEQ ID NO: 38865 - protein, 46 aa, Artificial Sequence
  Quasi-synthetic sequence derived from human genome
FNYLLRGGSHFPHGISRVRPLKTCSRPIRIGLSRKARIKQLHPYLK

SEQ ID NO: 38866 - protein, 46 aa, Artificial Sequence
  Quasi-synthetic sequence derived from human genome
KNTLRASVFLVRRAIKDIVTSVFQASLKLLKMIITQYIPKHKLSKL

SEQ ID NO: 38867 - protein, 46 aa, Artificial Sequence
  Quasi-synthetic sequence derived from human genome
AVAAEIKQIRARRKTARMLMIVLLVFAICYLPISILNVLKRVFGMF

SEQ ID NO: 38868 - protein, 46 aa, Artificial Sequence
  Quasi-synthetic sequence derived from human genome
INPMCYALCNKAFRDTFRLLLLCRWDKRRWRKIPKRPGSVHRTPSR

SEQ ID NO: 38869 - protein, 46 aa, Artificial Sequence
  Quasi-synthetic sequence derived from human genome
LIIAKMRMVALKAGWQQRKRSERKITLMVMMVVMVFVICWMPFYVV

SEQ ID NO: 38870 - protein, 46 aa, Artificial Sequence
  Quasi-synthetic sequence derived from human genome
KRWREELKRTGAPGAFHRWKVVLLVRTDKRSDSLIRKKFRMMKIPK

SEQ ID NO: 38871 - protein, 46 aa, Artificial Sequence
  Quasi-synthetic sequence derived from human genome
FNLIHRLSLMKTSAIKKIRNPKGPLILRLGAAPVTQPTRRVFPRGL

SEQ ID NO: 38872 - protein, 46 aa, Artificial Sequence
  Quasi-synthetic sequence derived from human genome
KVFHKLLNSNRHNTKHTGKKPFKCKKCGKSFCMLLHLCQHKRIHIR

SEQ ID NO: 38873 - protein, 46 aa, Artificial Sequence
  Quasi-synthetic sequence derived from human genome
LLKAVHIVQFIFILKLGTAFFMVLFQKPFSSGKTITKHQWIKIFKH

SEQ ID NO: 38874 - protein, 46 aa, Artificial Sequence
  Quasi-synthetic sequence derived from human genome
RFPVFLAILINFFIFVRIVQLLVAKLRARQMHHTDYKFRLAKSTLT

SEQ ID NO: 38875 - protein, 46 aa, Artificial Sequence
  Quasi-synthetic sequence derived from human genome
IPPKFSMKRLTAGLIAVIVVVVVALVAGMAVLVITNRRKSGKYKKV

SEQ ID NO: 38876 - protein, 46 aa, Artificial Sequence
  Quasi-synthetic sequence derived from human genome
FHFNRYLTRRRRIEIANNLCLNERQIKIWFQNRRMKWKKDSKMKSK

SEQ ID NO: 38877 - protein, 46 aa, Artificial Sequence
  Quasi-synthetic sequence derived from human genome
LRETWLIYKHTKLLKKIDHAKVRKHQRKFLQAIHQLRSVKMEQRKL

SEQ ID NO: 38878 - protein, 46 aa, Artificial Sequence
  Quasi-synthetic sequence derived from human genome
KITWYILVLLVFIFLIILTIRKILEGQRRVQKWQSHRDKPTSVLLR

SEQ ID NO: 38879 - protein, 46 aa, Artificial Sequence
  Quasi-synthetic sequence derived from human genome
KNIRKKDPVLLLHWWKEIVATILFCIIATTFIVRRLFHPHPHRQRK

SEQ ID NO: 38880 - protein, 46 aa, Artificial Sequence
  Quasi-synthetic sequence derived from human genome
PKCLYSRITVNTAFGTKFSHISFIILFKVFLFPRITISKKTKLVTL

SEQ ID NO: 38881 - protein, 46 aa, Artificial Sequence
  Quasi-synthetic sequence derived from human genome
KGPLCSPVTLGLLVAGVLVLLVSLGVAMHLCCRRRRARLRFMKQFY

SEQ ID NO: 38882 - protein, 46 aa, Artificial Sequence
  Quasi-synthetic sequence derived from human genome
KKSRIYSMMLRLSALFESHIKNIISEYKSAIQSQKRRRPRYRKRLR

SEQ ID NO: 38883 - protein, 46 aa, Artificial Sequence
  Quasi-synthetic sequence derived from human genome
LLRISKRRSKFPNSGKYATTARNSFIVLIIFTICFVPYHAFRFIYI

SEQ ID NO: 38884 - protein, 46 aa, Artificial Sequence
  Quasi-synthetic sequence derived from human genome
LVTPTISIVSYLFAKSNTVYNPVIYVFMIRKFRRSLLQLLCLRLLR

SEQ ID NO: 38885 - protein, 46 aa, Artificial Sequence
  Quasi-synthetic sequence derived from human genome
IFVPVPQLKSFQKIQVRLVRELEKKFSGKHVVFIAQRRILPKPTRK

SEQ ID NO: 38886 - protein, 46 aa, Artificial Sequence
  Quasi-synthetic sequence derived from human genome
KNLRRRKAHFQYLLNHRLQILSPVLPVSCRDPRHLRRLRDKLLSVA

SEQ ID NO: 38887 - protein, 46 aa, Artificial Sequence
  Quasi-synthetic sequence derived from human genome
ASGRPRRPRRRASRAFCPRPCALPGRPGLTLLCRPRCRRQPRLRLP

SEQ ID NO: 38888 - protein, 46 aa, Artificial Sequence
  Quasi-synthetic sequence derived from human genome
VLIKSKLPKFSQLLLQVVKPFSFVLLLGGLFLAYRMGVFILAGIRL

SEQ ID NO: 38889 - protein, 46 aa, Artificial Sequence
  Quasi-synthetic sequence derived from human genome
KVVQVFRLMRIFRVLKLARHSTGLRSLGATLKHSYREVGILLLYLA

SEQ ID NO: 38890 - protein, 46 aa, Artificial Sequence
  Quasi-synthetic sequence derived from human genome
KKTAWILGVYCRTYSRHMKYVVRRCANRQNLYTKYRPLFGYWVIGL

SEQ ID NO: 38891 - protein, 46 aa, Artificial Sequence
  Quasi-synthetic sequence derived from human genome
KWCIRHFYKPMLRRGSSKWMARTGVFLASAFFHEYLVSVPLRMFRL

SEQ ID NO: 38892 - protein, 46 aa, Artificial Sequence
  Quasi-synthetic sequence derived from human genome
RLLWKKLCQYHFSERQIRKRLILSDKGQLDWKKMYFKLVRCYPRKE

SEQ ID NO: 38893 - protein, 46 aa, Artificial Sequence
  Quasi-synthetic sequence derived from human genome
KICVFLFAFVVPILIITVCYGLMLLRLRSVRLLSGSKEKDRSLRRI

SEQ ID NO: 38894 - protein, 46 aa, Artificial Sequence
  Quasi-synthetic sequence derived from human genome
LYHALPFFCFLLGKCFKKGLKGKGFVLLVKLACIVVASFVLCWLPF

SEQ ID NO: 38895 - protein, 46 aa, Artificial Sequence
  Quasi-synthetic sequence derived from human genome
LVLKLDLRMKIIQNGIFLRKYNCIGHYLQDLKGKFPGIFIRVKAMR

SEQ ID NO: 38896 - protein, 46 aa, Artificial Sequence
  Quasi-synthetic sequence derived from human genome
RFIKYFVKGRQAVLSMVRKAKYRELLLSELLGRRAPVVVRLGLTYH

SEQ ID NO: 38897 - protein, 46 aa, Artificial Sequence
  Quasi-synthetic sequence derived from human genome
KKKNTFIVLNKNRTIFRFNAASILCTLSPFNCIRRTTIKVLVHPFF

SEQ ID NO: 38898 - protein, 46 aa, Artificial Sequence
  Quasi-synthetic sequence derived from human genome
LKNRTLDEYLTCLLLWVKQRRDLLHLCCKKLKILGMPFRNIRSILK

SEQ ID NO: 38899 - protein, 46 aa, Artificial Sequence
  Quasi-synthetic sequence derived from human genome
RYNQARGKFVSLFYTVVTPALNPLIYTLRNKKVKGAARRLLRSLGR

SEQ ID NO: 38900 - protein, 46 aa, Artificial Sequence
  Quasi-synthetic sequence derived from human genome
LTWIQYHSLDVIAFLLACVATMIFMITKCCLFCFRKLAKTGKKKKR

SEQ ID NO: 38901 - protein, 46 aa, Artificial Sequence
  Quasi-synthetic sequence derived from human genome
HRIRQLPVGKKEVEHYRKRWREINARPIKKVAEAKARKKRRMLKRL

SEQ ID NO: 38902 - protein, 46 aa, Artificial Sequence
  Quasi-synthetic sequence derived from human genome
IKNQTILKKGKRENIVNIRKQREKAAILIQAVWKGFILRKKLTTAL

SEQ ID NO: 38903 - protein, 46 aa, Artificial Sequence
  Quasi-synthetic sequence derived from human genome
LSRVRPMRNEQYRGKNPLLVPLLYDFRRMTARRRVNRKMGFHVIYK

SEQ ID NO: 38904 - protein, 46 aa, Artificial Sequence
  Quasi-synthetic sequence derived from human genome
LQILVWKNWLGVKRQPLWTLVLILWPVIIFIILAITRTKFPPTAKP

SEQ ID NO: 38905 - protein, 46 aa, Artificial Sequence
  Quasi-synthetic sequence derived from human genome
KVKKPKKVYCYVSPKQFSVKEFYLKIIPWRLYTFRVCPGTKFSYLG

SEQ ID NO: 38906 - protein, 46 aa, Artificial Sequence
  Quasi-synthetic sequence derived from human genome
KIRRKNCPACRLRKCCQAGMVLGGRKFKKFNKVRVVRALDAVALPQ

SEQ ID NO: 38907 - protein, 46 aa, Artificial Sequence
  Quasi-synthetic sequence derived from human genome
LKASKKKKRASFKRKSSKKGPEEGRWRPFIIRPTPSPLMKPLLVFV

SEQ ID NO: 38908 - protein, 46 aa, Artificial Sequence
  Quasi-synthetic sequence derived from human genome
EFRWMRLRIRRMADAWIQAIKSLAEKQNLEKRKRKKVLVHLGLLTK

SEQ ID NO: 38909 - protein, 46 aa, Artificial Sequence
  Quasi-synthetic sequence derived from human genome
GTKIQLAVSHMGVLVFQGTTKINTFNWSKVRKLSFKRKRFLIKLHP

SEQ ID NO: 38910 - protein, 46 aa, Artificial Sequence
  Quasi-synthetic sequence derived from human genome
GQGKPRGQPNTALLSLVLMAGTFFIAFFLRKFKNSRFFPGRIRRVI

SEQ ID NO: 38911 - protein, 46 aa, Artificial Sequence
  Quasi-synthetic sequence derived from human genome
RRYRVWSRILQAVNALGYCRRDVVDLKHKWRDLRAVVRRKLGDLRK

SEQ ID NO: 38912 - protein, 46 aa, Artificial Sequence
  Quasi-synthetic sequence derived from human genome
RSILLKTLCKLVDVGSDSLSLKLAKIILALKVSRKNLLNVCKLIFK

SEQ ID NO: 38913 - protein, 46 aa, Artificial Sequence
  Quasi-synthetic sequence derived from human genome
KRSWPFLRSFRVLRVFKLAKSWPTLNTLIKIIGNSVGALGSLTVVL

SEQ ID NO: 38914 - protein, 46 aa, Artificial Sequence
  Quasi-synthetic sequence derived from human genome
RYFSVTRPLSYRAKRTPRRAALMIGLAWLVSFVLWAPAILFWQYLV

SEQ ID NO: 38915 - protein, 46 aa, Artificial Sequence
  Quasi-synthetic sequence derived from human genome
RLPIRMAKGLGNISAKYRWFAVFYLIIFFFLIPLTVFGLSLAGWRV

SEQ ID NO: 38916 - protein, 46 aa, Artificial Sequence
  Quasi-synthetic sequence derived from human genome
QMPLKSSVGSRRGFFTKLPPAERRYFKRVVLAARTKRGHLVLKSFK

SEQ ID NO: 38917 - protein, 46 aa, Artificial Sequence
  Quasi-synthetic sequence derived from human genome
APWEVLGRYAEQMNVRMPFRRKIYYLPRRYKFMSRIDKQISRFRRW

SEQ ID NO: 38918 - protein, 46 aa, Artificial Sequence
  Quasi-synthetic sequence derived from human genome
KGLRSICMHTKKRVSSFRGNKIGLKDVITLRRHVETKVRAKIRKRK

SEQ ID NO: 38919 - protein, 46 aa, Artificial Sequence
  Quasi-synthetic sequence derived from human genome
VKRIGPHIEIFQVFRERKKFMITPKLIRMVTVMQAHVRGWLERKRL

SEQ ID NO: 38920 - protein, 46 aa, Artificial Sequence
  Quasi-synthetic sequence derived from human genome
WSRIKKILKEGPMLKNCNSFKRWKLRYFLVQGQKLYFAHHPAFAHF

SEQ ID NO: 38921 - protein, 46 aa, Artificial Sequence
  Quasi-synthetic sequence derived from human genome
KIFFLFRLCKKLPFNMMSWLNFSIRTEIRNLSVFLALPCKFTSQFR

SEQ ID NO: 38922 - protein, 46 aa, Artificial Sequence
  Quasi-synthetic sequence derived from human genome
MRNNYLKSRRFKMDLLSLLPLDFLYLKVGVNPLLRLPRCLKYMAFF

SEQ ID NO: 38923 - protein, 46 aa, Artificial Sequence
  Quasi-synthetic sequence derived from human genome
VFPLDYILITIIIMYFIFTSMAGIRNIGIWFFWIRLYKIRRGRTRP

SEQ ID NO: 38924 - protein, 46 aa, Artificial Sequence
  Quasi-synthetic sequence derived from human genome
RGRPRLRLGERGLMEPLLPPKRRLLPRVRLLPLLLALAVGSAFYTI

SEQ ID NO: 38925 - protein, 46 aa, Artificial Sequence
  Quasi-synthetic sequence derived from human genome
RIQRAYKLYLAVKNANKQVNSVICIQRWFRARLQEKRFIQKYHSIK

SEQ ID NO: 38926 - protein, 46 aa, Artificial Sequence
  Quasi-synthetic sequence derived from human genome
LLHHWVLWSAVKSRWVIVGLFVSILILSLVFASRLRPASRAPLLFR

SEQ ID NO: 38927 - protein, 46 aa, Artificial Sequence
  Quasi-synthetic sequence derived from human genome
ILITNVVCVFRTRCHLNLRKIALEGANVIYKRDVGKVLMKLRKPRI

SEQ ID NO: 38928 - protein, 46 aa, Artificial Sequence
  Quasi-synthetic sequence derived from human genome
RRWWKYAIDSVLEVHIRRYTQMWSWSNIKKHRQLLKSYKIAYKNKL

SEQ ID NO: 38929 - protein, 46 aa, Artificial Sequence
  Quasi-synthetic sequence derived from human genome
FYVNENTFKERLKLFFIKNQRSSLRIRLFNFSLKLLTCLLYIVRVL

SEQ ID NO: 38930 - protein, 46 aa, Artificial Sequence
  Quasi-synthetic sequence derived from human genome
LLRAEKKLRPHLAKVLVYELLLGKGFRGGGGRWKALLGRHQARLKA

SEQ ID NO: 38931 - protein, 46 aa, Artificial Sequence
  Quasi-synthetic sequence derived from human genome
SREFKRAFLRLLRCQCRRRRRRRPLWRVYGHHWRASTSGLRQDCAP

SEQ ID NO: 38932 - protein, 46 aa, Artificial Sequence
  Quasi-synthetic sequence derived from human genome
MLRTLLRRRLFSYPTKYYFMVLVLSLITFSVLRIHQKPEFVSVRHL

SEQ ID NO: 38933 - protein, 46 aa, Artificial Sequence
  Quasi-synthetic sequence derived from human genome
VSLVRHKDVRRIRSLQRSVQVLRAIVVMYVICWLPYHARRLMYCYV

SEQ ID NO: 38934 - protein, 46 aa, Artificial Sequence
  Quasi-synthetic sequence derived from human genome
ARRCGRPRRRDPRRRRTPALPRPWPGRGGPGRSLLHRHLFIQQLLR

SEQ ID NO: 38935 - protein, 46 aa, Artificial Sequence
  Quasi-synthetic sequence derived from human genome
RYYRLAPMRLYTLSKRHFVLVFVVFFICFGLTIFVGIRGPKVIQTS

SEQ ID NO: 38936 - protein, 46 aa, Artificial Sequence
  Quasi-synthetic sequence derived from human genome
IQHHTFYIRSYILNKDLLRKALILMNSKHTHLILCVLRFMRRMICL

SEQ ID NO: 38937 - protein, 46 aa, Artificial Sequence
  Quasi-synthetic sequence derived from human genome
RCIKKFSIQRFPKILVLHLKRFSESRIRTSKLTTFVNFPLRDLDLR

SEQ ID NO: 38938 - protein, 46 aa, Artificial Sequence
  Quasi-synthetic sequence derived from human genome
RWLQKVARSLALALLCLVLSTCVGPYLFPYFIPLNGDRLLRNKKRK

SEQ ID NO: 38939 - protein, 46 aa, Artificial Sequence
  Quasi-synthetic sequence derived from human genome
FTLLGKPLLGKDLVRVEATVIEKTESWPRIIMRFRKRKNFKKKRIV

SEQ ID NO: 38940 - protein, 46 aa, Artificial Sequence
  Quasi-synthetic sequence derived from human genome
LLLLLLGLLRPLRRRSCLLAPGKGPPALGASRGPRRSWAVWYQQPR

SEQ ID NO: 38941 - protein, 46 aa, Artificial Sequence
  Quasi-synthetic sequence derived from human genome
KHWRGYRERKNFHQQRQSLIEYKAAVTLQRAALKFLAKCRKKKKLF

SEQ ID NO: 38942 - protein, 46 aa, Artificial Sequence
  Quasi-synthetic sequence derived from human genome
KLSILASKLAPAMKTQKLRYRRCSSELLPMAKSYKRLRYKRLLDGF

SEQ ID NO: 38943 - protein, 46 aa, Artificial Sequence
  Quasi-synthetic sequence derived from human genome
KTSKPIVHARKKYRFHKTRSHVTHRTTKVKKSPKVRKKSYLSRLML

SEQ ID NO: 38944 - protein, 46 aa, Artificial Sequence
  Quasi-synthetic sequence derived from human genome
LKNRTLDEYLTCLLLWVKQRKDLLHLCCKKLKILGMPFRNIRSILK

SEQ ID NO: 38945 - protein, 46 aa, Artificial Sequence
  Quasi-synthetic sequence derived from human genome
PRAARPPLLLRPVKLLRRRFRLLLALAVVSVGLWTLYLELVASAQV

SEQ ID NO: 38946 - protein, 46 aa, Artificial Sequence
  Quasi-synthetic sequence derived from human genome
RVPGRGAPISALLSILSFLILYFSHCMIKVFLSSLKFHIRRFIFLF

SEQ ID NO: 38947 - protein, 46 aa, Artificial Sequence
  Quasi-synthetic sequence derived from human genome
PWAPACLPGFPVSWRTRMRAFHLSLPGGAQLLTYLVKVLKRRTWRR

SEQ ID NO: 38948 - protein, 46 aa, Artificial Sequence
  Quasi-synthetic sequence derived from human genome
YKKCGKRRQARRTAVIVQQKLRSSLLTKKQDQAARKIMRFLRRCRH

SEQ ID NO: 38949 - protein, 46 aa, Artificial Sequence
  Quasi-synthetic sequence derived from human genome
LARQRYQQMRRSLVKFRSLVHAYVSRRRYLKLRAEWRCQVEGALLW

SEQ ID NO: 38950 - protein, 46 aa, Artificial Sequence
  Quasi-synthetic sequence derived from human genome
PFLLLILLCMSLLLFQVIRLYQRRRWTIRAMHLFPAPPAHWFYGHK

SEQ ID NO: 38951 - protein, 46 aa, Artificial Sequence
  Quasi-synthetic sequence derived from human genome
GLARWKTHHLQCVRKRLLHRQSTQLLAQRLSRTCFRQWRQQLAARR

SEQ ID NO: 38952 - protein, 46 aa, Artificial Sequence
  Quasi-synthetic sequence derived from human genome
ILRLKSVRLLSGSREKDRNLRRITRLVLVVVAVFVVCWTPIHIFIL

SEQ ID NO: 38953 - protein, 46 aa, Artificial Sequence
  Quasi-synthetic sequence derived from human genome
RAAVTIQKAFCRMVTRKLETQKCAALRIQFFLQMAVYRRRFVQQKR

SEQ ID NO: 38954 - protein, 46 aa, Artificial Sequence
  Quasi-synthetic sequence derived from human genome
VKVLQASFRGVRVRRTLRKMQTAATLIQSNYRRYRQQTYFNKLKKI

SEQ ID NO: 38955 - protein, 46 aa, Artificial Sequence
  Quasi-synthetic sequence derived from human genome
LLNALNSYKSRFLCGKEIKKKKCIFRLRIRVPPNPPGKLLPDKGLL

SEQ ID NO: 38956 - protein, 46 aa, Artificial Sequence
  Quasi-synthetic sequence derived from human genome
KLSKRQLFFRKKLLHSSQMLRAVSLGQDRYRRRYWVLPYLAGIFVE

SEQ ID NO: 38957 - protein, 46 aa, Artificial Sequence
  Quasi-synthetic sequence derived from human genome
RRAKRKVTRMILIVAALFCLCWMPHHALILCVWFGQFPLTRATYAL

SEQ ID NO: 38958 - protein, 46 aa, Artificial Sequence
  Quasi-synthetic sequence derived from human genome
RRKSLRGRERVLSILRGVPHGKGRAIRLGVLKSPLKKLMSTALEMK

SEQ ID NO: 38959 - protein, 46 aa, Artificial Sequence
  Quasi-synthetic sequence derived from human genome
ACLPFVLAAAVSRKKKRRMGTYSLVPKKKTKVLKQRTVIEMFKSIT

SEQ ID NO: 38960 - protein, 46 aa, Artificial Sequence
  Quasi-synthetic sequence derived from human genome
IKTDVGRARAWIRLSLEKKLLSQHLKQLLSNQPLTKKLYKRYAFLR

SEQ ID NO: 38961 - protein, 46 aa, Artificial Sequence
  Quasi-synthetic sequence derived from human genome
LAFLQRRQRRRQDSRVVARSVRILVASFFLCWFPNHVVTLWGVLVK

SEQ ID NO: 38962 - protein, 46 aa, Artificial Sequence
  Quasi-synthetic sequence derived from human genome
ITRPLTYRAKRTTKRAGVMIGLAWVISFVLWAPAILFWQYFVGKRT

SEQ ID NO: 38963 - protein, 46 aa, Artificial Sequence
  Quasi-synthetic sequence derived from human genome
KSIVEKKPRTFIIKLIKWLMIAIPATFVNSAIRYLECKLALAFRTR

SEQ ID NO: 38964 - protein, 46 aa, Artificial Sequence
  Quasi-synthetic sequence derived from human genome
PLLAWLLLPLLLLLLVLLLAAYFFRFRKQRKAVVSTSDKKMPNGIL

SEQ ID NO: 38965 - protein, 46 aa, Artificial Sequence
  Quasi-synthetic sequence derived from human genome
VHKMPYFTRLILFLFCLMVLVESRKPKRKRWTGQVEMPKPSHLYKK

SEQ ID NO: 38966 - protein, 46 aa, Artificial Sequence
  Quasi-synthetic sequence derived from human genome
LRVILQASPGKLLWRKFQIPRFMPARPCSLYTCTYKTRNRALHPLW

SEQ ID NO: 38967 - protein, 46 aa, Artificial Sequence
  Quasi-synthetic sequence derived from human genome
LWLRLRGKGLAMLHVTRGVWGSRVRVWPLLPALLGPPRALSSLAAK

SEQ ID NO: 38968 - protein, 46 aa, Artificial Sequence
  Quasi-synthetic sequence derived from human genome
GTIQLGRKLITKYNRRELTDKLLIFLALALFLATVLYIVKKRLFPF

SEQ ID NO: 38969 - protein, 46 aa, Artificial Sequence
  Quasi-synthetic sequence derived from human genome
VRQRCLIQQKRRRHRATRKIGIAIATFLICFAPYVMTRLAELVPFV

SEQ ID NO: 38970 - protein, 46 aa, Artificial Sequence
  Quasi-synthetic sequence derived from human genome
VNVCPRLWMWSWKHIRKHRQKVKQYKELYKKKLTSKKPPGELLVSL

SEQ ID NO: 38971 - protein, 46 aa, Artificial Sequence
  Quasi-synthetic sequence derived from human genome
KVPYKGIVISLVLVLIPCTIGIVLKSKRPQYMRYVIKGGMIIILLC

SEQ ID NO: 38972 - protein, 46 aa, Artificial Sequence
  Quasi-synthetic sequence derived from human genome
FSVALLVILACVLWKKRIKPIVWPSLPDHKKTLEHLCKKPRKVSVF

SEQ ID NO: 38973 - protein, 46 aa, Artificial Sequence
  Quasi-synthetic sequence derived from human genome
KTFVVLNRGKTLFRFSATPALYILSPFNLIRRIAIKILIHSVFSMI

SEQ ID NO: 38974 - protein, 46 aa, Artificial Sequence
  Quasi-synthetic sequence derived from human genome
RKIPLVPENLLKKRKAYQALKATQAKQALLAKKEQKKGKGLRFKRL

SEQ ID NO: 38975 - protein, 46 aa, Artificial Sequence
  Quasi-synthetic sequence derived from human genome
LFLRTTAAARACRGLVVSTANRRLLRTSPPVRAFAKELFLGKIKKK

SEQ ID NO: 38976 - protein, 46 aa, Artificial Sequence
  Quasi-synthetic sequence derived from human genome
KIVQVMRKQKTINRFLMRKRLLFPALVTLLISTLTFPPGFGQFMAG

SEQ ID NO: 38977 - protein, 46 aa, Artificial Sequence
  Quasi-synthetic sequence derived from human genome
ILVCYVLMARRLLKPAYGTSGGLPRAKRKSVRTIAVVLAVFALCFL

SEQ ID NO: 38978 - protein, 46 aa, Artificial Sequence
  Quasi-synthetic sequence derived from human genome
RALLLWGRRLRPLLRAPALAAVPGGKPILCPRRTTAQLGPRRNPAW

SEQ ID NO: 38979 - protein, 46 aa, Artificial Sequence
  Quasi-synthetic sequence derived from human genome
QRRSRWPFSKARSFCKTHASLFKKILLGLLCLAYAAYLLAACILNF

SEQ ID NO: 38980 - protein, 46 aa, Artificial Sequence
  Quasi-synthetic sequence derived from human genome
IQCALFLLLLLLGTIATIVFFCCWHRKLQKGRHPMKSVFSGRSRSR

SEQ ID NO: 38981 - protein, 46 aa, Artificial Sequence
  Quasi-synthetic sequence derived from human genome
YTGIIKILLRRPNEKKSKAVRLIFVIMIIFFLFWTPYNLTILISVF

SEQ ID NO: 38982 - protein, 46 aa, Artificial Sequence
  Quasi-synthetic sequence derived from human genome
LPIIIKGSVGGLLVLIVILVILFKCGFFKRKYQQLNLESIRKAQLK

SEQ ID NO: 38983 - protein, 46 aa, Artificial Sequence
  Quasi-synthetic sequence derived from human genome
SRQKWIVKPPASARGIGIQVIHKWSQLPKRRPLLVQRYLHKPYLIS

SEQ ID NO: 38984 - protein, 46 aa, Artificial Sequence
  Quasi-synthetic sequence derived from human genome
RYIAICKPLRYTMILTSKIISLIAGIAVLRSLYMVVPLVFLLLRLP

SEQ ID NO: 38985 - protein, 46 aa, Artificial Sequence
  Quasi-synthetic sequence derived from human genome
QRRRKTVRLLLANLVIFLLCFVPYNSTLAVYGLLRSKLVAASVPAR

SEQ ID NO: 38986 - protein, 46 aa, Artificial Sequence
  Quasi-synthetic sequence derived from human genome
ARFQVTHFSWYWLWYTTKNCVGGLARKAWERLRLHRVNLIALQRRR

SEQ ID NO: 38987 - protein, 46 aa, Artificial Sequence
  Quasi-synthetic sequence derived from human genome
STVNIPLFRRFGRQRKIGGRGRIISPYRTPVLRRHRYSIFRSTTRG

SEQ ID NO: 38988 - protein, 46 aa, Artificial Sequence
  Quasi-synthetic sequence derived from human genome
RGDIGLLLGMIVFAVMLSILSLIGIFNRSFRTGIKRRILLLIPKWL

SEQ ID NO: 38989 - protein, 46 aa, Artificial Sequence
  Quasi-synthetic sequence derived from human genome
RTFMVLNKGRTISRFSATRALWLFSPFNLIRRTAIKVSVHSWFSLF

SEQ ID NO: 38990 - protein, 46 aa, Artificial Sequence
  Quasi-synthetic sequence derived from human genome
LQRGRQVTVPRAWLLFLRGSLPTFRSSLFLWVRPNGRVGPLVAGRR

SEQ ID NO: 38991 - protein, 46 aa, Artificial Sequence
  Quasi-synthetic sequence derived from human genome
YRYRKEFLRQRRAAVTLQAWWRGYCNRRNFKLILVGFERLQAIARS

SEQ ID NO: 38992 - protein, 46 aa, Artificial Sequence
  Quasi-synthetic sequence derived from human genome
VRIMRWFGLVSRTVMHCFWMFFVINYAHITYKNRSQGNIISYKRRI

SEQ ID NO: 38993 - protein, 46 aa, Artificial Sequence
  Quasi-synthetic sequence derived from human genome
SRQQIRKLIKDGLIIRKPVTVHSRARCRKNTLARRKGRHMGIGKRK

SEQ ID NO: 38994 - protein, 46 aa, Artificial Sequence
  Quasi-synthetic sequence derived from human genome
LSTPRSHHLYHARLWLHVLPTLPGTLCLRIFRWGPRRRRQGSRTLL

SEQ ID NO: 38995 - protein, 46 aa, Artificial Sequence
  Quasi-synthetic sequence derived from human genome
RIQAYWRGCVVRKWYRNLRKTVPPTDAKLRKKFFEKKFTEISHRIL

SEQ ID NO: 38996 - protein, 46 aa, Artificial Sequence
  Quasi-synthetic sequence derived from human genome
RRRAKKARLLGPTVMLGGCEFSRQRLQAFGLNPKRLHFRQLGRQRR

SEQ ID NO: 38997 - protein, 46 aa, Artificial Sequence
  Quasi-synthetic sequence derived from human genome
LLLRWWTKASFSVVGMVKSLTRSSMVKLILVWLTAIVLFCWFYVYR

SEQ ID NO: 38998 - protein, 46 aa, Artificial Sequence
  Quasi-synthetic sequence derived from human genome
RKHIIWMNHYLVSFVIVTTATLAYFIFYHIHRLCLARIQNRRWQRL

SEQ ID NO: 38999 - protein, 46 aa, Artificial Sequence
  Quasi-synthetic sequence derived from human genome
CVRRLPFGKCRIPNNSLPYFHKRPQARMLLLALFCVAVSVVWGVFR

SEQ ID NO: 39000 - protein, 46 aa, Artificial Sequence
  Quasi-synthetic sequence derived from human genome
KALPKKGVLGKSPLSALARKKARLSLVIRSPSLLQSGAKKKAQVRK

SEQ ID NO: 39001 - protein, 47 aa, Artificial Sequence
  Quasi-synthetic sequence derived from human genome
RARLIPIIVLLLQKAWRGTLARWRCRRLRAIYTIMRWFRRHKVRAHL

SEQ ID NO: 39002 - protein, 47 aa, Artificial Sequence
  Quasi-synthetic sequence derived from human genome
LLLKRGSCRSTWLRVRKARPQLILSRRPRRRLGSLRWCGRRRLRWRL

SEQ ID NO: 39003 - protein, 47 aa, Artificial Sequence
  Quasi-synthetic sequence derived from human genome
IFRGKKARRHLKMMHIAATLIQRRFRTLMMRRRFLSLKKTAILIQRK

SEQ ID NO: 39004 - protein, 47 aa, Artificial Sequence
  Quasi-synthetic sequence derived from human genome
FRIYAVSTLLLFLLFFLFRLLLRFLRLCRSFYITCRRLRCFPQPPRR

SEQ ID NO: 39005 - protein, 47 aa, Artificial Sequence
  Quasi-synthetic sequence derived from human genome
RCRGKLLVHSLNLLAKQGLRLLRGLRRRNVQKKVALAKKLLAKLRFL

SEQ ID NO: 39006 - protein, 47 aa, Artificial Sequence
  Quasi-synthetic sequence derived from human genome
LPYPVKIKVRFSFFLQIYLIMIFLGLYINFRHLYKQRRRRYGQKKKK

SEQ ID NO: 39007 - protein, 47 aa, Artificial Sequence
  Quasi-synthetic sequence derived from human genome
IFFDIKLLRNIPRWTHLLRLLRLIILLRIFHLFHQKRQLEKLIRRRV

SEQ ID NO: 39008 - protein, 47 aa, Artificial Sequence
  Quasi-synthetic sequence derived from human genome
LGFLARKQYRKVLYCVVIIQKNYRAFLLRRRFLHLKKAAIVFQKQLR

SEQ ID NO: 39009 - protein, 47 aa, Artificial Sequence
  Quasi-synthetic sequence derived from human genome
FLYRKNRSRIPLLRKRWFQLGHSMNPRARKNRSRIPLLRKRRFQLYR

SEQ ID NO: 39010 - protein, 47 aa, Artificial Sequence
  Quasi-synthetic sequence derived from human genome
KAARIIQLAVINFLAKQRLRKRVNAALVIQKYWRRVLAQRKLLMLKK

SEQ ID NO: 39011 - protein, 47 aa, Artificial Sequence
  Quasi-synthetic sequence derived from human genome
ASKKKKKRYLRASSNRNFLLTMRPFLKRAILVLSYVLVILYFRLWIM

SEQ ID NO: 39012 - protein, 47 aa, Artificial Sequence
  Quasi-synthetic sequence derived from human genome
KGLLIFLLLVILAMGLWVIRVQKRHKMPRMKKLMRNRMKLRKEAKPG

SEQ ID NO: 39013 - protein, 47 aa, Artificial Sequence
  Quasi-synthetic sequence derived from human genome
LRGFFIKRRFRSLRHKIILLQSRARGYLARQRYQQMRRSLVKFRSLV

SEQ ID NO: 39014 - protein, 47 aa, Artificial Sequence
  Quasi-synthetic sequence derived from human genome
FGYRLRRVIAAFYFPKREKKRILFLYNDLLKKRAAFTKLRRAAILRR

SEQ ID NO: 39015 - protein, 47 aa, Artificial Sequence
  Quasi-synthetic sequence derived from human genome
RIAGVKRFLKHAGKWSLRWFLSPRWILQFRRWARKWSRFTRSSFQVR

SEQ ID NO: 39016 - protein, 47 aa, Artificial Sequence
  Quasi-synthetic sequence derived from human genome
RKRIQYLHAKLLKKRSKQPLGEVKRRLSLYLTKIHFWLPVLKMIRKK

SEQ ID NO: 39017 - protein, 47 aa, Artificial Sequence
  Quasi-synthetic sequence derived from human genome
FLGHRLLKRLLGPKLRRFLKPQGHPRLLLWFKRGLALAAFLGLVLWL

SEQ ID NO: 39018 - protein, 47 aa, Artificial Sequence
  Quasi-synthetic sequence derived from human genome
LRNIPRWTHLLRLLRLIILLRIFHLFHQKRQLEKLIRRRVSENKRRY

SEQ ID NO: 39019 - protein, 47 aa, Artificial Sequence
  Quasi-synthetic sequence derived from human genome
LRAQMLIRIVLFLQKVWRGTLARMRYKRTKAALTIIRYYRRYKVKSY

SEQ ID NO: 39020 - protein, 47 aa, Artificial Sequence
  Quasi-synthetic sequence derived from human genome
RLLNKLTKWKHSRTMMLVVFKSAPILKRALKVKQAMLQLYVLKLLKL

SEQ ID NO: 39021 - protein, 47 aa, Artificial Sequence
  Quasi-synthetic sequence derived from human genome
CRRWGQAISKSKLSRRWRRWNRFNRRRCRAAVKSVTFYWLVIVLVFL

SEQ ID NO: 39022 - protein, 47 aa, Artificial Sequence
  Quasi-synthetic sequence derived from human genome
KAATIIQKYWRMYVVRRRYKIRRAATIVLQSYLRGFLARNRYRKILR

SEQ ID NO: 39023 - protein, 47 aa, Artificial Sequence
  Quasi-synthetic sequence derived from human genome
KRALGRRKGVWLRLRKILFCVLGLYIAIPFLIKLCPGIQAKLIFLNF

SEQ ID NO: 39024 - protein, 47 aa, Artificial Sequence
  Quasi-synthetic sequence derived from human genome
RIPLLRKRWFQLGRSMNPRARKKRSRIPLLRKRRFQLGRSMNPRARK

SEQ ID NO: 39025 - protein, 47 aa, Artificial Sequence
  Quasi-synthetic sequence derived from human genome
RSLLLGPARLCLRLLLLLGYRRRCPPLLRGLVQRWRYGKVCLRSLLY

SEQ ID NO: 39026 - protein, 47 aa, Artificial Sequence
  Quasi-synthetic sequence derived from human genome
AWWRGVLVRRTLLVAALRAWMIQCWWRTLVQRRIRQRRQALLRVYVI

SEQ ID NO: 39027 - protein, 47 aa, Artificial Sequence
  Quasi-synthetic sequence derived from human genome
RFRSLLVRRRFISLKKATIFVQRKYRATICAKHKLYQFLHLRKAAIT

SEQ ID NO: 39028 - protein, 47 aa, Artificial Sequence
  Quasi-synthetic sequence derived from human genome
RIPLLRKRRFQLGRSMNPRARKNRSRIPLLRKRRFQLGRSMNLRARK

SEQ ID NO: 39029 - protein, 47 aa, Artificial Sequence
  Quasi-synthetic sequence derived from human genome
LRILNKLTKWKHSRTMMLVVFKSAPILKRALKVKQAMMQLYVLKLLK

SEQ ID NO: 39030 - protein, 47 aa, Artificial Sequence
  Quasi-synthetic sequence derived from human genome
IFFDIKLLRNIPRWTHLVRLLRLIILIRIFHLLHQKRQLEKLMRRLV

SEQ ID NO: 39031 - protein, 47 aa, Artificial Sequence
  Quasi-synthetic sequence derived from human genome
IKLLPLRTFRVFRALKAISVVSRLKVIVGALLRSVKKLVNVIILTFF

SEQ ID NO: 39032 - protein, 47 aa, Artificial Sequence
  Quasi-synthetic sequence derived from human genome
VKIFRCPSPIYFANIGFFRRKLIDAVGFSPLRILRKRNKALRKIRKL

SEQ ID NO: 39033 - protein, 47 aa, Artificial Sequence
  Quasi-synthetic sequence derived from human genome
RIPLLRKRRFQLYRSMNPRARKNRSHIPLVRKRRFQLRRCMNPRARK

SEQ ID NO: 39034 - protein, 47 aa, Artificial Sequence
  Quasi-synthetic sequence derived from human genome
RVQRRPWGAWLSARLWKWLKSPRSWRLGLALLLGGALLFWVLLHRRW

SEQ ID NO: 39035 - protein, 47 aa, Artificial Sequence
  Quasi-synthetic sequence derived from human genome
KVTWMRRMRILRRLLRRYRESKKIDRHMYHSLYLKVKGNVFKNKRIL

SEQ ID NO: 39036 - protein, 47 aa, Artificial Sequence
  Quasi-synthetic sequence derived from human genome
RLARAYRRSQRASFKRARRPGARALRLVLGIVLLFWACFLPFWLWQL

SEQ ID NO: 39037 - protein, 47 aa, Artificial Sequence
  Quasi-synthetic sequence derived from human genome
LKVLFKKTHRILRRLFNLCKRCHRQPRFRLPKERSLSYWWNRIQSLL

SEQ ID NO: 39038 - protein, 47 aa, Artificial Sequence
  Quasi-synthetic sequence derived from human genome
RRRFSGRPKLSGRLGLLGRRGFSGRLGGYWKTWIFWKTWIFWKTWIF

SEQ ID NO: 39039 - protein, 47 aa, Artificial Sequence
  Quasi-synthetic sequence derived from human genome
PRARKNRSRIPLLRKRRFQLYRSTNPRARKNRSRIPLLRKRRFQLYR

SEQ ID NO: 39040 - protein, 47 aa, Artificial Sequence
  Quasi-synthetic sequence derived from human genome
KRKKRIKRRALLFLSYILTHFIFLALLLILIVLLRHTDCFYYNQFIR

SEQ ID NO: 39041 - protein, 47 aa, Artificial Sequence
  Quasi-synthetic sequence derived from human genome
RLYLQKKIIQKHFEKKKDIRRGIGYLKLICFLIPFLLSLKKKMKVPY

SEQ ID NO: 39042 - protein, 47 aa, Artificial Sequence
  Quasi-synthetic sequence derived from human genome
KPLIFLGCCFFSTLVLLLSIAIFQRQKRRKFWKAKNLQHIPLKKGKR

SEQ ID NO: 39043 - protein, 47 aa, Artificial Sequence
  Quasi-synthetic sequence derived from human genome
IRLKNIRKVYGRCMWYRLRLLKPQPNIIPTVKKIVLLAGWALFLFLA

SEQ ID NO: 39044 - protein, 47 aa, Artificial Sequence
  Quasi-synthetic sequence derived from human genome
IIRLMLKYQKILWKVPSFLITQVRRMNEATMLLKKQLPSVRKLLRRK

SEQ ID NO: 39045 - protein, 47 aa, Artificial Sequence
  Quasi-synthetic sequence derived from human genome
HLRKRIHRPRRRTTRRWKRWFKFRKRKGEKRPRPNHKAVARRAKLKF

SEQ ID NO: 39046 - protein, 47 aa, Artificial Sequence
  Quasi-synthetic sequence derived from human genome
KTMKFILWRRFRWAIILFIILFILLLFLAIFIYAFPNYAAMKLVKPF

SEQ ID NO: 39047 - protein, 47 aa, Artificial Sequence
  Quasi-synthetic sequence derived from human genome
IVAAMRRIRYEFKAKNIKKKKVSIMVSVDGVKVILKKKKKLLLLQKK

SEQ ID NO: 39048 - protein, 47 aa, Artificial Sequence
  Quasi-synthetic sequence derived from human genome
CIRIQKTIRGWLLRKKYLRMRKAAITMQRYVRGYQARCYAKFLRRTK

SEQ ID NO: 39049 - protein, 47 aa, Artificial Sequence
  Quasi-synthetic sequence derived from human genome
IFWKTWIFWKTWIFRKTYIGWKTWIFSGRCGLTGRPGFGGRRRFFWK

SEQ ID NO: 39050 - protein, 47 aa, Artificial Sequence
  Quasi-synthetic sequence derived from human genome
KFKLFTLVSACIPVFRLARRRKKILFYCHFPDLLLTKRDSFLKRLYR

SEQ ID NO: 39051 - protein, 47 aa, Artificial Sequence
  Quasi-synthetic sequence derived from human genome
KVLFKKTHRILRRLFNLCKRCHRQPRFRLPKERSLSYWWNRIQSLLY

SEQ ID NO: 39052 - protein, 47 aa, Artificial Sequence
  Quasi-synthetic sequence derived from human genome
PRKKIHRRVLKKNPLKNLRIMLKLNPYAKTMRRNTILRQARNHKLRV

SEQ ID NO: 39053 - protein, 47 aa, Artificial Sequence
  Quasi-synthetic sequence derived from human genome
WWIIRTPILMTILINFLIFIRILGILLSKLRTRQMRCRDYRLRLARS

SEQ ID NO: 39054 - protein, 47 aa, Artificial Sequence
  Quasi-synthetic sequence derived from human genome
PRARKNRSRIPLLRKRRFQLYRSMNSRARKNRSQIVLFQKRRFHFFC

SEQ ID NO: 39055 - protein, 47 aa, Artificial Sequence
  Quasi-synthetic sequence derived from human genome
RLGFLRLQALHRSRKLHQQYRLARQRIIQFQARCRAYLVRKAFRHRL

SEQ ID NO: 39056 - protein, 47 aa, Artificial Sequence
  Quasi-synthetic sequence derived from human genome
VLKHARHFRGRKNRCYRLAVRTVIRAFVKCTKARYLKKKNMRTLWIN

SEQ ID NO: 39057 - protein, 47 aa, Artificial Sequence
  Quasi-synthetic sequence derived from human genome
RQRFLKLKYYSIILQSRIRMIIAVTSYKRYLWATVTIQRHWRAYLRR

SEQ ID NO: 39058 - protein, 47 aa, Artificial Sequence
  Quasi-synthetic sequence derived from human genome
RCLNKIMKTRVCRRLRRANRVLRARCRRAVKSNACYWAVLLLVFLNT

SEQ ID NO: 39059 - protein, 47 aa, Artificial Sequence
  Quasi-synthetic sequence derived from human genome
PRARKNRSRIPLLRKRRFQLYRSTNPRARKNRSRIPLLRKHRFQLYR

SEQ ID NO: 39060 - protein, 47 aa, Artificial Sequence
  Quasi-synthetic sequence derived from human genome
FLFLRRRCFLLTFYLWFLFFSRFLLMLFLPLLTSVVTFLPPLRARRP

SEQ ID NO: 39061 - protein, 47 aa, Artificial Sequence
  Quasi-synthetic sequence derived from human genome
NKYPRGVGWRILKVLLWLLAILTGLIAGKFLFHQRLFGQLLRLKMFR

SEQ ID NO: 39062 - protein, 47 aa, Artificial Sequence
  Quasi-synthetic sequence derived from human genome
LRVLRVLRPLKTIKRLPKLKAVFDCVVTSLKNVFNILIVYKLFMFIF

SEQ ID NO: 39063 - protein, 47 aa, Artificial Sequence
  Quasi-synthetic sequence derived from human genome
KLPVRSLTYFSARKGKRKTVKAVIDRFLRLHCGLWVRRKAGYKKKLW

SEQ ID NO: 39064 - protein, 47 aa, Artificial Sequence
  Quasi-synthetic sequence derived from human genome
FRVIRLARIGRILRLIRAAKGIRTLLFALMMSLPALFNIGLLLFLVM

SEQ ID NO: 39065 - protein, 47 aa, Artificial Sequence
  Quasi-synthetic sequence derived from human genome
LFRVIRLARIGRILRLIKGAKGIRTLLFALMMSLPALFNIGLLLFLV

SEQ ID NO: 39066 - protein, 47 aa, Artificial Sequence
  Quasi-synthetic sequence derived from human genome
LTFNKFWRRYGKLSRHLMKVKLKKYTKFLFVRDPFVRLISAFRSKFE

SEQ ID NO: 39067 - protein, 47 aa, Artificial Sequence
  Quasi-synthetic sequence derived from human genome
LALALVGVLILFMFRRLRQFRQAQPTPQYRFRKRDKVMFYGRKIMRK

SEQ ID NO: 39068 - protein, 47 aa, Artificial Sequence
  Quasi-synthetic sequence derived from human genome
PRSKILTVRVILAPWKKGLIAVVIIGVIIALLIIAAKCYFLRKAKAK

SEQ ID NO: 39069 - protein, 47 aa, Artificial Sequence
  Quasi-synthetic sequence derived from human genome
WLNNLAEKAKRCNRRLKSQILLKKYLMKRRWKKNFIAVSAANRFKKI

SEQ ID NO: 39070 - protein, 47 aa, Artificial Sequence
  Quasi-synthetic sequence derived from human genome
RKYISKYSVFLRHRYQSRSAFLGRYLKKKKSVVSRLKKAKRTAKVLL

SEQ ID NO: 39071 - protein, 47 aa, Artificial Sequence
  Quasi-synthetic sequence derived from human genome
IYLRLLVKLYRFLARRTNSTFNQVVLKRLFMSRTNRPPLSLSRMIRK

SEQ ID NO: 39072 - protein, 47 aa, Artificial Sequence
  Quasi-synthetic sequence derived from human genome
LLRICRVLRSLKLLAQFRQIQIIILVLVRALKSMTFLLMLLLIFFYI

SEQ ID NO: 39073 - protein, 47 aa, Artificial Sequence
  Quasi-synthetic sequence derived from human genome
KKIWWIIRGPMMLCVTVNFFIFLKILKLLISKLKAHQMCFRDYKYRL

SEQ ID NO: 39074 - protein, 47 aa, Artificial Sequence
  Quasi-synthetic sequence derived from human genome
RIPLLRKRRFQLGRSMNLRARKNRSQIVLFQKRRFQFFCSMSGRAWV

SEQ ID NO: 39075 - protein, 47 aa, Artificial Sequence
  Quasi-synthetic sequence derived from human genome
RIPLLRKRRFQLCRCMNPRARKNRSQIVLFQKLRFQFFCSMSCRAWV

SEQ ID NO: 39076 - protein, 47 aa, Artificial Sequence
  Quasi-synthetic sequence derived from human genome
FRVIRLARIGRILRLIRGAKGIRTLLFALMMSLPALFNIGLLLFLVM

SEQ ID NO: 39077 - protein, 47 aa, Artificial Sequence
  Quasi-synthetic sequence derived from human genome
LLFLSVPQPRPPGARTRAGAARVARWRRLRLQQLRRLRGLLRVLRGR

SEQ ID NO: 39078 - protein, 47 aa, Artificial Sequence
  Quasi-synthetic sequence derived from human genome
CYRTLDRRLRKNLRALVVVHATWYVKAFLALLRPFISSKFTRKIRFL

SEQ ID NO: 39079 - protein, 47 aa, Artificial Sequence
  Quasi-synthetic sequence derived from human genome
LRPLVKPKIVKKRTKKFIRHQSDRYVKIKRNWRKPRGIDNRVRRRFK

SEQ ID NO: 39080 - protein, 47 aa, Artificial Sequence
  Quasi-synthetic sequence derived from human genome
HIPLVRKRRFQLRRCMNPRARKNRSQIVLFQKRRFHFFCSMSCRAWV

SEQ ID NO: 39081 - protein, 47 aa, Artificial Sequence
  Quasi-synthetic sequence derived from human genome
RKMNHHKYRKLVKKTRFLRRKVQEGRLRRKQIKFEKDLRRIWLKAGL

SEQ ID NO: 39082 - protein, 47 aa, Artificial Sequence
  Quasi-synthetic sequence derived from human genome
AIVHPLRLRHLRRPRVARLLCLGVWALILVFAVPAARVHRPSRCRYR

SEQ ID NO: 39083 - protein, 47 aa, Artificial Sequence
  Quasi-synthetic sequence derived from human genome
VYLVASFLFVLMLLFFTILVLSYFRYMRIYRRYIYEPLHKPQRKRKK

SEQ ID NO: 39084 - protein, 47 aa, Artificial Sequence
  Quasi-synthetic sequence derived from human genome
FIVPFAIIGLCYSLIVRVLVRAHRHRGLRPRRQKALRMILAVVLVFF

SEQ ID NO: 39085 - protein, 47 aa, Artificial Sequence
  Quasi-synthetic sequence derived from human genome
FLCGLLSKAKQKLLRHLVPAAALRRKRKALWAHLFSSLRGYLKSLPR

SEQ ID NO: 39086 - protein, 47 aa, Artificial Sequence
  Quasi-synthetic sequence derived from human genome
VLLRRVTRNLVRNKLAVITRLLQNLIMGLFLLFFVLRVRSNVLKGAI

SEQ ID NO: 39087 - protein, 47 aa, Artificial Sequence
  Quasi-synthetic sequence derived from human genome
HRRIKLSPLMMYEKLSMIRFRYRILRSQHFRTKSKVCKLRKAQRSWV

SEQ ID NO: 39088 - protein, 47 aa, Artificial Sequence
  Quasi-synthetic sequence derived from human genome
PRARKNRSRIPLLRKHRFQLYRSMNSRARKNRSQIVLFQKRRFHFFC

SEQ ID NO: 39089 - protein, 47 aa, Artificial Sequence
  Quasi-synthetic sequence derived from human genome
RCRGRKRCIKKFSIQRFPKILVLHLKRFSESRIRTSKLTTFVNFPLR

SEQ ID NO: 39090 - protein, 47 aa, Artificial Sequence
  Quasi-synthetic sequence derived from human genome
FNVPVFWPILVMYFIMLFCITMKRQIKHMIKYRYIPFTHGKRRYRGK

SEQ ID NO: 39091 - protein, 47 aa, Artificial Sequence
  Quasi-synthetic sequence derived from human genome
FIARKLQKNLKTGSFLNRLGKLLLHLFMVLCLTLFLNNIIKKILNLK

SEQ ID NO: 39092 - protein, 47 aa, Artificial Sequence
  Quasi-synthetic sequence derived from human genome
PKRKKKKKFCYLCILLLIVLFILLCCLYRLCKKSKPIKKQQDVQTPS

SEQ ID NO: 39093 - protein, 47 aa, Artificial Sequence
  Quasi-synthetic sequence derived from human genome
ILTNPRSLKHLCRLKIRKCMGRLHLRCPVFMSFLPLPNRLKAYVLYK

SEQ ID NO: 39094 - protein, 47 aa, Artificial Sequence
  Quasi-synthetic sequence derived from human genome
RQRRQKLLLAQLHHRKRVKAAGQIQAWWRGVLVRRTLLVAALRAWMI

SEQ ID NO: 39095 - protein, 47 aa, Artificial Sequence
  Quasi-synthetic sequence derived from human genome
LKSRKRRKMSKKLPPVIIKYIIINRFRGRKNMLVKLGKIDSKEKQVI

SEQ ID NO: 39096 - protein, 47 aa, Artificial Sequence
  Quasi-synthetic sequence derived from human genome
LIQAMWRRYRAKKYLCKVKAACKIQAWYRCWRAHKEYLAILKAVKII

SEQ ID NO: 39097 - protein, 47 aa, Artificial Sequence
  Quasi-synthetic sequence derived from human genome
RSWCLCKLLRFFYSLFFPGLIVCGTLCVCLVIVLWGIRLLLQRKKKL

SEQ ID NO: 39098 - protein, 47 aa, Artificial Sequence
  Quasi-synthetic sequence derived from human genome
MPRLPVKKIRKQMKLLLLLLLLSCAAWLTYVHLGLVRQGRALRQRLG

SEQ ID NO: 39099 - protein, 47 aa, Artificial Sequence
  Quasi-synthetic sequence derived from human genome
KQRLKRLRNIHYLFNTALFLIAWRLLIARSQMARNVWFFIVSFCYKF

SEQ ID NO: 39100 - protein, 47 aa, Artificial Sequence
  Quasi-synthetic sequence derived from human genome
RQRIIQFQARCRAYLVRKAFRHRLWAVLTVQAYARGMIARRLHQRLR

SEQ ID NO: 39101 - protein, 47 aa, Artificial Sequence
  Quasi-synthetic sequence derived from human genome
KHMKVFHKYSNRNKVRHTKKKTFKCIKCSKSFFMLSCLIRHKRIHIR

SEQ ID NO: 39102 - protein, 47 aa, Artificial Sequence
  Quasi-synthetic sequence derived from human genome
RRCKKRMFKFHQMKHIFEILDKMRCLRKRSTVSFLGVLVIFLLFMNL

SEQ ID NO: 39103 - protein, 47 aa, Artificial Sequence
  Quasi-synthetic sequence derived from human genome
DRFLRLHCGLWVRRKAGYKKKLWKKTPARKKRLREFVFCNKTQSKLL

SEQ ID NO: 39104 - protein, 47 aa, Artificial Sequence
  Quasi-synthetic sequence derived from human genome
PCKTMKFIVWRRFKWVIIGLLFLLILLLFVAVLLYSLPNYLSMKIVK

SEQ ID NO: 39105 - protein, 47 aa, Artificial Sequence
  Quasi-synthetic sequence derived from human genome
AVFIQAWWRGMLVRRTLLHAALRAWIIQCWWRQVLEKLLAKRRRMVL

SEQ ID NO: 39106 - protein, 47 aa, Artificial Sequence
  Quasi-synthetic sequence derived from human genome
KFLSLANKRLPVKRAAVQFLNNAWGIQKKQNAKRFKRRWMVRKMKTK

SEQ ID NO: 39107 - protein, 47 aa, Artificial Sequence
  Quasi-synthetic sequence derived from human genome
KTVKKKIKPTLPLRIFINVSRFFCVQLKKMVRLMYINSFISFPLNIV

SEQ ID NO: 39108 - protein, 47 aa, Artificial Sequence
  Quasi-synthetic sequence derived from human genome
FHRWKVVLLVRTDKRSDSLIRKKFRMMKIPKPILFGLNIAMKKQTKI

SEQ ID NO: 39109 - protein, 47 aa, Artificial Sequence
  Quasi-synthetic sequence derived from human genome
IYILVCLFFVFLSLLEYVYINYLFYSRGPRRQPRRHRRPRRVIARYR

SEQ ID NO: 39110 - protein, 47 aa, Artificial Sequence
  Quasi-synthetic sequence derived from human genome
FFPRRPRIHFRFPNRPFVPSRCNHRFPFQPFYWPHRYLTYRYFPRRR

SEQ ID NO: 39111 - protein, 47 aa, Artificial Sequence
  Quasi-synthetic sequence derived from human genome
RLFRIKCVTRIQAYWRGCVVRKWYRNLRKTVPPTDAKLRKKFFEKKF

SEQ ID NO: 39112 - protein, 47 aa, Artificial Sequence
  Quasi-synthetic sequence derived from human genome
FFLIAVRLASLNQILDPWVYLLLRKILLRKFCQMRKRRLREQFWRPA

SEQ ID NO: 39113 - protein, 47 aa, Artificial Sequence
  Quasi-synthetic sequence derived from human genome
LKKKRRNFAELKIKRLRKKFAQKMLRKARRKLIYEKAKHYHKEYRQM

SEQ ID NO: 39114 - protein, 47 aa, Artificial Sequence
  Quasi-synthetic sequence derived from human genome
MRRLRRLAHLVLFCPFSKRLQGRLPGLRVRCIFLAWLGVFAGSWLVY

SEQ ID NO: 39115 - protein, 47 aa, Artificial Sequence
  Quasi-synthetic sequence derived from human genome
ALFLSVLVILLVIYVSWKRYPASMKQLQQRSLMRRHRKKKRQSLKQM

SEQ ID NO: 39116 - protein, 47 aa, Artificial Sequence
  Quasi-synthetic sequence derived from human genome
YWRRVLAQRKLLMLKKEKLEKVQNKAASLIQAMWRRYRAKKYLCKVK

SEQ ID NO: 39117 - protein, 47 aa, Artificial Sequence
  Quasi-synthetic sequence derived from human genome
RALALFVITCLVIFVLVHSFLKKLLGKKLTRCLKPFENSRLRLWTKW

SEQ ID NO: 39118 - protein, 47 aa, Artificial Sequence
  Quasi-synthetic sequence derived from human genome
IWHKFKQWVIPWHLNKRYNRKRFFALPYVDHFLRLEREKRARIKARK

SEQ ID NO: 39119 - protein, 47 aa, Artificial Sequence
  Quasi-synthetic sequence derived from human genome
RRQIYAVATLRFLKLRRERRALLCLLLVLGIAFIPIILEKIMYKVTR

SEQ ID NO: 39120 - protein, 47 aa, Artificial Sequence
  Quasi-synthetic sequence derived from human genome
KSLRVLRVLRPLKTIKRLPKLKAVFDCVVNSLKNVLNILIVYMLFMF

SEQ ID NO: 39121 - protein, 47 aa, Artificial Sequence
  Quasi-synthetic sequence derived from human genome
KSLRVLRVLRPLKTIKRLPKLKAVFDCVVNSLKNVFNILIVYMLFMF

SEQ ID NO: 39122 - protein, 47 aa, Artificial Sequence
  Quasi-synthetic sequence derived from human genome
KKIDVIRRKVSKIQRFHARSLWTNHKRYGYKKHSYRLVKKLKLQKMK

SEQ ID NO: 39123 - protein, 47 aa, Artificial Sequence
  Quasi-synthetic sequence derived from human genome
IKLKNKIKYRAEACIKMQKTIRMWLCKRRHKPRIDGLVKVGTLKKRL

SEQ ID NO: 39124 - protein, 47 aa, Artificial Sequence
  Quasi-synthetic sequence derived from human genome
FLPKCIRAKIQDYHILTRKRIRYRFRRFIQQFSQCKATARNLKLKYL

SEQ ID NO: 39125 - protein, 47 aa, Artificial Sequence
  Quasi-synthetic sequence derived from human genome
KLLKRLRLLPALLILRAFKPHRKIRDYRVVVVGTAGVGKSTLLHKWA

SEQ ID NO: 39126 - protein, 47 aa, Artificial Sequence
  Quasi-synthetic sequence derived from human genome
RRMIDYRHFVPQMPFVPAVAKSIPRKRISLKRPKKCFRNLFHIRRNK

SEQ ID NO: 39127 - protein, 47 aa, Artificial Sequence
  Quasi-synthetic sequence derived from human genome
FLARRRYRKMLEEHKAVILQKYARAWLARRRFQSIRRFVLNIQLTYR

SEQ ID NO: 39128 - protein, 47 aa, Artificial Sequence
  Quasi-synthetic sequence derived from human genome
KLFMRMASKQLRENVLVKRKRTKGKKLLLSIGVLLHKWKNVCIVLTA

SEQ ID NO: 39129 - protein, 47 aa, Artificial Sequence
  Quasi-synthetic sequence derived from human genome
KSWRRRSCWRKWKQLSRLQRNMILFLLAFLLFCGLLFYINLADHWKA

SEQ ID NO: 39130 - protein, 47 aa, Artificial Sequence
  Quasi-synthetic sequence derived from human genome
LATKIQAAWRGFHWRQKFLRVKRSAICIQSWWRGTLGRRKAAKRKWA

SEQ ID NO: 39131 - protein, 47 aa, Artificial Sequence
  Quasi-synthetic sequence derived from human genome
LTFTLFKCLLLTGGCTLLHCFVILPVFLTFFPPSKKHHKKKKRAKRK

SEQ ID NO: 39132 - protein, 47 aa, Artificial Sequence
  Quasi-synthetic sequence derived from human genome
RPIGKAKPKKQSKKKVPFWNVQNKIILFTVFLFILAVIAWTLLWLYI

SEQ ID NO: 39133 - protein, 47 aa, Artificial Sequence
  Quasi-synthetic sequence derived from human genome
LRWVRLLGFAIVYGTIILKLYRVLQLFLSRTAQRSALLSSGRLLRRL

SEQ ID NO: 39134 - protein, 47 aa, Artificial Sequence
  Quasi-synthetic sequence derived from human genome
LRALRLLRIFKVTKYWASLRNLVVSLLNSMKSIISLLFLLFLFIVVF

SEQ ID NO: 39135 - protein, 47 aa, Artificial Sequence
  Quasi-synthetic sequence derived from human genome
ALRRKKKKTIKMLMLVVVLFALCWFPLNCYVLLLSSKVIRTNNALYF

SEQ ID NO: 39136 - protein, 47 aa, Artificial Sequence
  Quasi-synthetic sequence derived from human genome
QRLLFAKLFGHLTSARRARKSEVPHFRLKKVQNIKMWLSLRSYLKRR

SEQ ID NO: 39137 - protein, 47 aa, Artificial Sequence
  Quasi-synthetic sequence derived from human genome
RISILLRDLPTLKAAVIVAFAFTTLLIACLLLRVFRSGKRLKKTRKY

SEQ ID NO: 39138 - protein, 47 aa, Artificial Sequence
  Quasi-synthetic sequence derived from human genome
RKHLNKLRNIRYGFNTILVILIWRIFIARSQMARNIWYFVVSLCYKF

SEQ ID NO: 39139 - protein, 47 aa, Artificial Sequence
  Quasi-synthetic sequence derived from human genome
RAGLVLRLLRALRVLYVMRLARHSLGLRSLGLTMRRCAREFGLLLLF

SEQ ID NO: 39140 - protein, 47 aa, Artificial Sequence
  Quasi-synthetic sequence derived from human genome
WLARLLRSRAGSRKRPLTLLQRAGLLLLLGLLGFLALLALMSRLGRA

SEQ ID NO: 39141 - protein, 47 aa, Artificial Sequence
  Quasi-synthetic sequence derived from human genome
RYRKILREHKAVIIQKRVRGWLARTHYKRSMHAIIYLQCCFRRMMAK

SEQ ID NO: 39142 - protein, 47 aa, Artificial Sequence
  Quasi-synthetic sequence derived from human genome
RVRFLNLKKTIIKFQAHVRKHQQRQKYKKMKKAAVIIQTHFRAYIFA

SEQ ID NO: 39143 - protein, 47 aa, Artificial Sequence
  Quasi-synthetic sequence derived from human genome
LKLTCSAFRLQRALRFLLGRLPWRVASGARRFRRWLNRYSYTVLSSW

SEQ ID NO: 39144 - protein, 47 aa, Artificial Sequence
  Quasi-synthetic sequence derived from human genome
MNVRMPFRRKIYYLPRRYKFMSRIDKQISRFRRWLPKKPMRLDKETL

SEQ ID NO: 39145 - protein, 47 aa, Artificial Sequence
  Quasi-synthetic sequence derived from human genome
KHLRKSLKIIYLNSIQQLEIRNMSWPRLIRKLRCYLKEMKNLRKLVF

SEQ ID NO: 39146 - protein, 47 aa, Artificial Sequence
  Quasi-synthetic sequence derived from human genome
QIISFFLALTSTALLFLLFFLTLRFSVVKRGRKKLLYIFKQPFMRPV

SEQ ID NO: 39147 - protein, 47 aa, Artificial Sequence
  Quasi-synthetic sequence derived from human genome
FSLFRKWKAFSVWRKNVRSKKITGCQKSLQKNLFIVNPHLRPALLKI

SEQ ID NO: 39148 - protein, 47 aa, Artificial Sequence
  Quasi-synthetic sequence derived from human genome
LKRALKVKQAMLQLYVLKLLKLQTKYLGRQWRKSNMKTMSAIYQKVR

SEQ ID NO: 39149 - protein, 47 aa, Artificial Sequence
  Quasi-synthetic sequence derived from human genome
LWHWLLRTGGWKVSAVTLAYLIFCLCSLVGILHLQRALVLRRKRKRM

SEQ ID NO: 39150 - protein, 47 aa, Artificial Sequence
  Quasi-synthetic sequence derived from human genome
WLKKCYQMIDRRLRKNLKSLIIVHPSWFIRTVLAISRPFISVKFINK

SEQ ID NO: 39151 - protein, 47 aa, Artificial Sequence
  Quasi-synthetic sequence derived from human genome
LRALRLLRIFKVTKYWSSLRNLVVSLLNSMKSIISLLFLLFLFIVVF

SEQ ID NO: 39152 - protein, 47 aa, Artificial Sequence
  Quasi-synthetic sequence derived from human genome
LRKYIYIRSCVVIIQKRFRCFQAQKLYKRRKESILTIQKYYKAYLKG

SEQ ID NO: 39153 - protein, 47 aa, Artificial Sequence
  Quasi-synthetic sequence derived from human genome
YRRRCCRLCIWLLQTLVHLLQLGQVWRYLRALYLGLQSRWRGERLRR

SEQ ID NO: 39154 - protein, 47 aa, Artificial Sequence
  Quasi-synthetic sequence derived from human genome
KLHWWRFLVIWILFSAVTAFVTFRATRKPLVQTTPRLVYKWFLLIYK

SEQ ID NO: 39155 - protein, 47 aa, Artificial Sequence
  Quasi-synthetic sequence derived from human genome
VVVTAVLILLVVRRLRVPKTPAPDGPRYRFRKRDKVLFYGRKIMRKV

SEQ ID NO: 39156 - protein, 47 aa, Artificial Sequence
  Quasi-synthetic sequence derived from human genome
FLRLFRAARLIKLLRQGYTIRILLWTFVQSFKALPYVCLLIAMLFFI

SEQ ID NO: 39157 - protein, 47 aa, Artificial Sequence
  Quasi-synthetic sequence derived from human genome
RYFALVQPFRLTRWRTRYKTIRINLGLWAASFILALPVWVYSKVIKF

SEQ ID NO: 39158 - protein, 47 aa, Artificial Sequence
  Quasi-synthetic sequence derived from human genome
LIQGAIYAGIVIALLFLCLLPLIVKHIRKKQAKKAAAIRAKKSSKVR

SEQ ID NO: 39159 - protein, 47 aa, Artificial Sequence
  Quasi-synthetic sequence derived from human genome
RRRMPGLGWMKKCYQMIDRRLRKNLKSFIIVHPSWFIRTILAVTRPF

SEQ ID NO: 39160 - protein, 47 aa, Artificial Sequence
  Quasi-synthetic sequence derived from human genome
LHIFPRLARHDRGNYVRLNMKQKHYVRGRALRSRLLRKQAWKQKWRK

SEQ ID NO: 39161 - protein, 47 aa, Artificial Sequence
  Quasi-synthetic sequence derived from human genome
RFLFAKLFSHITSARKARKYEIPHFRLKKVENIKIWLSLRSYLKRRG

SEQ ID NO: 39162 - protein, 47 aa, Artificial Sequence
  Quasi-synthetic sequence derived from human genome
RWQRRLRRAARRQVLSGHLPFCRFRLRYPSLSPSAFWVWKSLARGWP

SEQ ID NO: 39163 - protein, 47 aa, Artificial Sequence
  Quasi-synthetic sequence derived from human genome
LKAKKAQLMQYLSLPKTPKMLKMSKGLDARSKRWLKIIWRRHGIWPL

SEQ ID NO: 39164 - protein, 47 aa, Artificial Sequence
  Quasi-synthetic sequence derived from human genome
LTVNALLVLLALAAWASRWLRRKLRARRKGGAPVHVRHMYSTRRPLR

SEQ ID NO: 39165 - protein, 47 aa, Artificial Sequence
  Quasi-synthetic sequence derived from human genome
MVVVMKFFRWVRRAWQRIISWVFFWRQKIKPTISGHPDSKKHSLKKM

SEQ ID NO: 39166 - protein, 47 aa, Artificial Sequence
  Quasi-synthetic sequence derived from human genome
KLAFVIRIRGINGVSPKVRKVLQLLRLRQIFNGTFVKLNKASINMLR

SEQ ID NO: 39167 - protein, 47 aa, Artificial Sequence
  Quasi-synthetic sequence derived from human genome
FLKLFRAARLIKLLRQGYTIRILLWTFVQSFKALPYVCLLIAMLFFI

SEQ ID NO: 39168 - protein, 47 aa, Artificial Sequence
  Quasi-synthetic sequence derived from human genome
WRRRHWAVKMVTCFIIGLLFPVFSVCYLIAPKSPLGLFIRKPFIKFI

SEQ ID NO: 39169 - protein, 47 aa, Artificial Sequence
  Quasi-synthetic sequence derived from human genome
WLIISCSIAYVALVTLLIWVPVKVILHKKRYIYRKIKGWRPVLMMCV

SEQ ID NO: 39170 - protein, 47 aa, Artificial Sequence
  Quasi-synthetic sequence derived from human genome
LLLVPLLVLALASYRRLCLRLRLADCLVPYSRALYRRRRAPQPRQIR

SEQ ID NO: 39171 - protein, 47 aa, Artificial Sequence
  Quasi-synthetic sequence derived from human genome
RPLLLQKLLKDGGVLSPILTRLMNFFVFSRGLLQYINQRKKFRRRWV

SEQ ID NO: 39172 - protein, 47 aa, Artificial Sequence
  Quasi-synthetic sequence derived from human genome
MKGKKPSFMVIRFPGRRGYGRLRPRARSLSKASTAINWLTKKFLLKK

SEQ ID NO: 39173 - protein, 47 aa, Artificial Sequence
  Quasi-synthetic sequence derived from human genome
KEKLGLLLLTFLGIVAAVLVKKYQAVLRRKALLIFLVVHRLRWSSKQ

SEQ ID NO: 39174 - protein, 47 aa, Artificial Sequence
  Quasi-synthetic sequence derived from human genome
WSLRRRPARTLGLLLLVVLGFLVLRRLDWSTLVPLRLRHRQLGLQAK

SEQ ID NO: 39175 - protein, 47 aa, Artificial Sequence
  Quasi-synthetic sequence derived from human genome
LKKRAAFTKLRRAAILRRERQQKAPRHPLADILHRGCPLLRRWLCRR

SEQ ID NO: 39176 - protein, 47 aa, Artificial Sequence
  Quasi-synthetic sequence derived from human genome
FGARKKRSWYLTWKYKLTNQRALRRFCQTGAVLFLLVTVIVNIKLIL

SEQ ID NO: 39177 - protein, 47 aa, Artificial Sequence
  Quasi-synthetic sequence derived from human genome
KGKRCIVLVTELMTSGTLKTYLKRFKVMKPKVLRSWCRQILKGLLFL

SEQ ID NO: 39178 - protein, 47 aa, Artificial Sequence
  Quasi-synthetic sequence derived from human genome
LAILRIIRLVRVFRIFKLSRHSKGLQILGQTLKASMRELGLLIFFLF

SEQ ID NO: 39179 - protein, 47 aa, Artificial Sequence
  Quasi-synthetic sequence derived from human genome
RRKMPSLGWLRKCYQQIDRRLRKNLKSLIIVHPSWFIRTLLAVTRPF

SEQ ID NO: 39180 - protein, 47 aa, Artificial Sequence
  Quasi-synthetic sequence derived from human genome
KKAVWHKLLSKQRKRAVVACFRMAPLYNLPRHRSINLFLHGYQRFWI

SEQ ID NO: 39181 - protein, 47 aa, Artificial Sequence
  Quasi-synthetic sequence derived from human genome
LFVYLNRKIVQVMRKQKTINRFLMRKRLLFPALVTLLISTLTFPPGF

SEQ ID NO: 39182 - protein, 47 aa, Artificial Sequence
  Quasi-synthetic sequence derived from human genome
QRKQIKRKAPRGFLKRVFKRKKPQLRLEKSGDLLVHLNCLLFVHRLA

SEQ ID NO: 39183 - protein, 47 aa, Artificial Sequence
  Quasi-synthetic sequence derived from human genome
FIQKRKFQEIKNSTIKIQAMWRRYRAKKYLCKVKAACKIQAWYRCWR

SEQ ID NO: 39184 - protein, 47 aa, Artificial Sequence
  Quasi-synthetic sequence derived from human genome
RKKPLPWRSPLLLLAMWGPQAPPCLCRKRGRGACIKCERLRPRIRRR

SEQ ID NO: 39185 - protein, 47 aa, Artificial Sequence
  Quasi-synthetic sequence derived from human genome
RKNTLARRKGRHMGIGKRKGTANARMPEKVTWMRRMRILRRLLRRYR

SEQ ID NO: 39186 - protein, 47 aa, Artificial Sequence
  Quasi-synthetic sequence derived from human genome
RGMLPVAVLVALLAVIVLVALLLLWRRRQKRRTGALVLSRGGKRNGV

SEQ ID NO: 39187 - protein, 47 aa, Artificial Sequence
  Quasi-synthetic sequence derived from human genome
RLRFLFNELRPAVCNDLSIMSKFKLLSSLPRWRRIAQKIIRERRKKR

SEQ ID NO: 39188 - protein, 47 aa, Artificial Sequence
  Quasi-synthetic sequence derived from human genome
RANYWLKLVKGILPLVGMAMVPALLGLIGYHLYRKANRPKVSKKKLK

SEQ ID NO: 39189 - protein, 47 aa, Artificial Sequence
  Quasi-synthetic sequence derived from human genome
FILVVMFWLIFLLIILSYIKIGKNLLRISKRRSKFPNSGKYATTARN

SEQ ID NO: 39190 - protein, 47 aa, Artificial Sequence
  Quasi-synthetic sequence derived from human genome
MAHLKRLVKLHIKRHYHKKFWKLGAVIFFFIIVLVLMQREVSVQYSK

SEQ ID NO: 39191 - protein, 47 aa, Artificial Sequence
  Quasi-synthetic sequence derived from human genome
RPGAWRRDIFGRIIWHKFKQWVIPWHLNKRYNRKRFFALPYVDHFLR

SEQ ID NO: 39192 - protein, 47 aa, Artificial Sequence
  Quasi-synthetic sequence derived from human genome
IPKRKRKAKKRRKNDVVVVKGKLKLCSISGLIALCGILVLLVGIAMA

SEQ ID NO: 39193 - protein, 47 aa, Artificial Sequence
  Quasi-synthetic sequence derived from human genome
QRIIQFQARCRAYLVRKAFRHRLWAVLTVQAYARGMIARRLHQRLRA

SEQ ID NO: 39194 - protein, 47 aa, Artificial Sequence
  Quasi-synthetic sequence derived from human genome
LRVFVEGWTHLVRLLRLIILIRIFHLLHQKRQLEKLMRRLVSENKRR

SEQ ID NO: 39195 - protein, 47 aa, Artificial Sequence
  Quasi-synthetic sequence derived from human genome
LAILRVIRLVRVFRIFKLSRHSKGLQILGQTLRASMRELGLLIFFLF

SEQ ID NO: 39196 - protein, 47 aa, Artificial Sequence
  Quasi-synthetic sequence derived from human genome
RITLRFFASVLIRRIHKVDIPSIITKKLLKAAMKHIEVIVKARQKVK

SEQ ID NO: 39197 - protein, 47 aa, Artificial Sequence
  Quasi-synthetic sequence derived from human genome
FKLLILLIGTWALFFRKRRADMPRVFVFRALLLVLIFLFVVSYWLFY

SEQ ID NO: 39198 - protein, 47 aa, Artificial Sequence
  Quasi-synthetic sequence derived from human genome
WRRKHWVVKLLTCMTIGFLFPMLSIAYLISPRSNLGLFIKKPFIKFI

SEQ ID NO: 39199 - protein, 47 aa, Artificial Sequence
  Quasi-synthetic sequence derived from human genome
ATKIQAWWRGTLVRRALLHAALSACIIQCWWRLILSKILKKRRQAAL

SEQ ID NO: 39200 - protein, 47 aa, Artificial Sequence
  Quasi-synthetic sequence derived from human genome
IFRLVQASGQKAPRPAARRKARRLLKTVLMILLAFLVCWGPLFGLLL

SEQ ID NO: 39201 - protein, 47 aa, Artificial Sequence
  Quasi-synthetic sequence derived from human genome
RAASRLAFQGWLRRGVLLVRAPPACLQVLRDAWRRRALRPPRGFRIR

SEQ ID NO: 39202 - protein, 47 aa, Artificial Sequence
  Quasi-synthetic sequence derived from human genome
KKRAKTITFSKNAVISKRGGKLCLLIRVANLRKSLLIGSHIYGKLLK

SEQ ID NO: 39203 - protein, 47 aa, Artificial Sequence
  Quasi-synthetic sequence derived from human genome
FLNPFKKIKDHLLLIKKVTWTMNGLMLPTDIKRRKTKPVLSIRMKKL

SEQ ID NO: 39204 - protein, 47 aa, Artificial Sequence
  Quasi-synthetic sequence derived from human genome
LKVIRTGKRKKKAWKRMVTKVCFVGDGFTRKPPKYERFIRPMGLRFK

SEQ ID NO: 39205 - protein, 47 aa, Artificial Sequence
  Quasi-synthetic sequence derived from human genome
LAILRVIRLVRVFRIFKLSRHSKGLQILGQTLKASMRELGLLIFFLF

SEQ ID NO: 39206 - protein, 47 aa, Artificial Sequence
  Quasi-synthetic sequence derived from human genome
IAAARKVYIQTRRQRKLHFVVGGFAYLLPKTAVVLRCPARRVRKPLI

SEQ ID NO: 39207 - protein, 47 aa, Artificial Sequence
  Quasi-synthetic sequence derived from human genome
LRMIRKHVRKNYMKFKAKFSLIQFHRIIESAILSFTSLIKHLNLHKI

SEQ ID NO: 39208 - protein, 47 aa, Artificial Sequence
  Quasi-synthetic sequence derived from human genome
WRAVMLIQAAIRSWLTRKHIQRLHAAATVIKRAWQKWRIRMACLAAK

SEQ ID NO: 39209 - protein, 47 aa, Artificial Sequence
  Quasi-synthetic sequence derived from human genome
KVLCERGNSLMNNRTGRRKSWRLEFLFLRRRCFLLTFYLWFLFFSRF

SEQ ID NO: 39210 - protein, 47 aa, Artificial Sequence
  Quasi-synthetic sequence derived from human genome
FFIVPSHRRKIFPGLILSDIKPAKRMKFKTVCYLLVQLMHCRKMFKA

SEQ ID NO: 39211 - protein, 47 aa, Artificial Sequence
  Quasi-synthetic sequence derived from human genome
AFAGKLLSVFRQPLSSLWRSLVPLFCWLRATFWLLATKRRKQQLVLR

SEQ ID NO: 39212 - protein, 47 aa, Artificial Sequence
  Quasi-synthetic sequence derived from human genome
ISLLLLLVVCGIGCVWHWKHRVATRFTLPRFLQRRSSRRKVCTKTFL

SEQ ID NO: 39213 - protein, 47 aa, Artificial Sequence
  Quasi-synthetic sequence derived from human genome
KIVWSLRRRQQLARQARMKKATRFIMVVAIVFITCYLPSVSARLYFL

SEQ ID NO: 39214 - protein, 47 aa, Artificial Sequence
  Quasi-synthetic sequence derived from human genome
RASRGPIAFWARRASRTRLAAWARRALLSLRSPKARRGKARRRAAKL

SEQ ID NO: 39215 - protein, 47 aa, Artificial Sequence
  Quasi-synthetic sequence derived from human genome
RGRWEGSAPRRLLLALHRRLRGLRRAAAGTSRLLFQRLLPCGVIKFR

SEQ ID NO: 39216 - protein, 47 aa, Artificial Sequence
  Quasi-synthetic sequence derived from human genome
KYHRFLGRHFPRFYVLYTIFMKGLQMLWADAKKARRIKTNMWKHNIK

SEQ ID NO: 39217 - protein, 47 aa, Artificial Sequence
  Quasi-synthetic sequence derived from human genome
ILCHKFMRFMMMRAENFFILRRKPVEQKKIFTIQGCYPVIRCLLRRR

SEQ ID NO: 39218 - protein, 47 aa, Artificial Sequence
  Quasi-synthetic sequence derived from human genome
RQRVLPRMQARMRGFQARKRYLRRRAALGQLNTILLVAQPLLQRRQR

SEQ ID NO: 39219 - protein, 47 aa, Artificial Sequence
  Quasi-synthetic sequence derived from human genome
RYLRVKLTVRYKRVTTHRRIWLALGLCWLVSFLVGLTPMFGWNMKLT

SEQ ID NO: 39220 - protein, 47 aa, Artificial Sequence
  Quasi-synthetic sequence derived from human genome
ILRRKLYIHRVTLRKLLPGVQYVYRCGSAQGWSRRFRFRALKNGAHW

SEQ ID NO: 39221 - protein, 47 aa, Artificial Sequence
  Quasi-synthetic sequence derived from human genome
LRRIRAAVVLQKHYRMQRARQAYQRVRRAAVVIQAFTRAMFVRRTYR

SEQ ID NO: 39222 - protein, 47 aa, Artificial Sequence
  Quasi-synthetic sequence derived from human genome
PTRRPRPRRELSLGRKKAPHRLCGRFSRISMKLPRIPLRRQKLPKVV

SEQ ID NO: 39223 - protein, 47 aa, Artificial Sequence
  Quasi-synthetic sequence derived from human genome
LLLVVVTWRVCQKSHCFRLGRQLSKALQVNCVVRKLLVQLRRLYWWV

SEQ ID NO: 39224 - protein, 47 aa, Artificial Sequence
  Quasi-synthetic sequence derived from human genome
MRFQQFLFAFFIFIMSLLLISGQRPVNLTMRRKLRKHNCLQRRCMPL

SEQ ID NO: 39225 - protein, 47 aa, Artificial Sequence
  Quasi-synthetic sequence derived from human genome
KYWRRVLAQRKLLMLKKEKLEKVQNKAASLIQGYWRRYSTRQRFLKL

SEQ ID NO: 39226 - protein, 47 aa, Artificial Sequence
  Quasi-synthetic sequence derived from human genome
VLSIASLIFSAILKSLQSYFSPTLFRVIRLARIGRILRLIRAAKGIR

SEQ ID NO: 39227 - protein, 47 aa, Artificial Sequence
  Quasi-synthetic sequence derived from human genome
FRTLMMRRRFLSLKKTAILIQRKYRAHLCTKHHLQFLQVQNAVIKIQ

SEQ ID NO: 39228 - protein, 47 aa, Artificial Sequence
  Quasi-synthetic sequence derived from human genome
ILQAAFRGMKTRRHLKSMHSSATLIQSRFRSLLVRRRFISLKKATIF

SEQ ID NO: 39229 - protein, 47 aa, Artificial Sequence
  Quasi-synthetic sequence derived from human genome
RSNAPNIPKLNRFLLLFIGFVCVLLSFFMARVFMRMKLPRSLALLPR

SEQ ID NO: 39230 - protein, 47 aa, Artificial Sequence
  Quasi-synthetic sequence derived from human genome
FLNPLKSARYFLWHTYRWLLLKLLLLLLLLLLLALFLYSVPGYLVKK

SEQ ID NO: 39231 - protein, 47 aa, Artificial Sequence
  Quasi-synthetic sequence derived from human genome
HKTFRIKRFLAKKQKQNRPIPQWIRMKTGNKIRYNSKRRHWRRTKLG

SEQ ID NO: 39232 - protein, 47 aa, Artificial Sequence
  Quasi-synthetic sequence derived from human genome
KGKKCIVLVTELMTSGTLKTYLKRFKVMKIKVLRSWCRQILKGLQFL

SEQ ID NO: 39233 - protein, 47 aa, Artificial Sequence
  Quasi-synthetic sequence derived from human genome
LMRKSQILISSWFRGNMQKKCYGKIKASVLLIQAFVRGWKARKNYRK

SEQ ID NO: 39234 - protein, 47 aa, Artificial Sequence
  Quasi-synthetic sequence derived from human genome
LRRAIVFTRQLVTYIVVGVTLRPAILVIPCLLLIKCHLKLYRTKLIY

SEQ ID NO: 39235 - protein, 47 aa, Artificial Sequence
  Quasi-synthetic sequence derived from human genome
LRTFRLLRVLKLVRFLPALRRQLVVLVKTMDNVATFCTLLMLFIFIF

SEQ ID NO: 39236 - protein, 47 aa, Artificial Sequence
  Quasi-synthetic sequence derived from human genome
LKRALKVKQAMMQLYVLKLLKVQTKYLGRQWRKSNMKTMSAIYQKVR

SEQ ID NO: 39237 - protein, 47 aa, Artificial Sequence
  Quasi-synthetic sequence derived from human genome
AHKRMKVKKLPMILALHLKRFKYMDQLHRYTKLSYRVVFPLELRLFN

SEQ ID NO: 39238 - protein, 47 aa, Artificial Sequence
  Quasi-synthetic sequence derived from human genome
RKFVFFNIPQIQYKNPWVQIMMFKNMTPSPFLRFYLGKPSGKRRRRK

SEQ ID NO: 39239 - protein, 47 aa, Artificial Sequence
  Quasi-synthetic sequence derived from human genome
WKLFQALKLNLFGLVLPLLVMIICYTGIIKILLRRPNEKKSKAVRLI

SEQ ID NO: 39240 - protein, 47 aa, Artificial Sequence
  Quasi-synthetic sequence derived from human genome
KKLVPVRRRAWGQLCLPPQRLRVTRHPLIPAPVLGLLLLLLLSVLLL

SEQ ID NO: 39241 - protein, 47 aa, Artificial Sequence
  Quasi-synthetic sequence derived from human genome
LFIVLILVGYISVKVMLKSIKTRLGRRVPAAPPALRRNLLLQAWKCV

SEQ ID NO: 39242 - protein, 47 aa, Artificial Sequence
  Quasi-synthetic sequence derived from human genome
FQQFSSLTNLPLRKLKFSPIKYGYQPRRNFWPARLATRLLKLRYLIL

SEQ ID NO: 39243 - protein, 47 aa, Artificial Sequence
  Quasi-synthetic sequence derived from human genome
RAALSIQKVLRGYRYRKEFLRQRRAAVTLQAWWRGYCNRRNFKLILV

SEQ ID NO: 39244 - protein, 47 aa, Artificial Sequence
  Quasi-synthetic sequence derived from human genome
WRAYRDKLKFWTHCVLATLIMFTIFSFFAEQLIALKRKIFPRRRIHK

SEQ ID NO: 39245 - protein, 47 aa, Artificial Sequence
  Quasi-synthetic sequence derived from human genome
IRNIGIWFFWIRLYKIRRGRTRPQALLFLCMILLLIVLHTSYMIYSL

SEQ ID NO: 39246 - protein, 47 aa, Artificial Sequence
  Quasi-synthetic sequence derived from human genome
RKLLIQAAIVRIMKMRKVLKHQQLLGEVLTQLSSRFKPRVPVIKKCI

SEQ ID NO: 39247 - protein, 47 aa, Artificial Sequence
  Quasi-synthetic sequence derived from human genome
FRVAKKRAPKVLGTTLVVGLLAGVGYFAFMLFRKRLGSMILAFRPRP

SEQ ID NO: 39248 - protein, 47 aa, Artificial Sequence
  Quasi-synthetic sequence derived from human genome
FFLIAVRLASLNQILDPWVYLLLRKILLRKFCQMRKRRLREQLICSL

SEQ ID NO: 39249 - protein, 47 aa, Artificial Sequence
  Quasi-synthetic sequence derived from human genome
NIKAGKAFLRLKRKFIQMRRPFLERRDLIIQHIPGFWVKAFLNHPRI

SEQ ID NO: 39250 - protein, 47 aa, Artificial Sequence
  Quasi-synthetic sequence derived from human genome
FPARWSFRAYTSVLYFNPWMRIFIQAKRVKTKHLCYCLYRPRKYLYV

SEQ ID NO: 39251 - protein, 47 aa, Artificial Sequence
  Quasi-synthetic sequence derived from human genome
RVKAAPGPKAALAVIRGGATRAAGVFYPWRFRLLCLLRRWLPRPRAW

SEQ ID NO: 39252 - protein, 47 aa, Artificial Sequence
  Quasi-synthetic sequence derived from human genome
FRAVLDVANHFSRLKIHFTKVFSAFALVRTIRYLYRRLQRMLGLRRG

SEQ ID NO: 39253 - protein, 47 aa, Artificial Sequence
  Quasi-synthetic sequence derived from human genome
MWKGKTLRRQLQRQHKCAIIIQSYYRMHVQQKKWKIMKKAALLIQKY

SEQ ID NO: 39254 - protein, 47 aa, Artificial Sequence
  Quasi-synthetic sequence derived from human genome
RGYLARKAFAKKQQQLSALKVLQRNCAAYLKLRHWQWWRVFTKVKPL

SEQ ID NO: 39255 - protein, 47 aa, Artificial Sequence
  Quasi-synthetic sequence derived from human genome
RRRGRPSRRFLGKKYRKYYYKSPKPLLRPFLCRICGSRFLSHEDLRF

SEQ ID NO: 39256 - protein, 47 aa, Artificial Sequence
  Quasi-synthetic sequence derived from human genome
RILAVITIQAGVRGYLARRRIRLWHRGAMVIQATWRGYRVRRNLAHL

SEQ ID NO: 39257 - protein, 47 aa, Artificial Sequence
  Quasi-synthetic sequence derived from human genome
RRLKAHNLCRQIRAACVIQSYWRMRQDRVRFLNLKKTIIKFQAHVRK

SEQ ID NO: 39258 - protein, 47 aa, Artificial Sequence
  Quasi-synthetic sequence derived from human genome
KRYNRKRFFALPYVDHFLRLEREKRARIKARKENLERKKAKILLKKF

SEQ ID NO: 39259 - protein, 47 aa, Artificial Sequence
  Quasi-synthetic sequence derived from human genome
AQKRMRVKKLPMILALHLKRFKYMEQLHRYTKLSYRVVFPLELRLFN

SEQ ID NO: 39260 - protein, 47 aa, Artificial Sequence
  Quasi-synthetic sequence derived from human genome
KIPSRFKRSYNYKTIVKKILAKLKRARSKKLDNFQSEKKVFKKSFLR

SEQ ID NO: 39261 - protein, 47 aa, Artificial Sequence
  Quasi-synthetic sequence derived from human genome
RLARIGRILRLIRGAKGIRTLLFALMMSLPALFNIGLLLFLVMFIYS

SEQ ID NO: 39262 - protein, 47 aa, Artificial Sequence
  Quasi-synthetic sequence derived from human genome
IFFAFVLLLSGALAYCLALQLYVRRRKKLPSVLLFKKPSPFIFISQR

SEQ ID NO: 39263 - protein, 47 aa, Artificial Sequence
  Quasi-synthetic sequence derived from human genome
VVKILRVLRVLRPLRAINRAKGLKHVVQCVFVAIRTIGNIMIVTTLL

SEQ ID NO: 39264 - protein, 47 aa, Artificial Sequence
  Quasi-synthetic sequence derived from human genome
ARLRPRLHFCLVLLLLLVVPAAWGCGPGRVVGSRRRPPRKLVPLAYK

SEQ ID NO: 39265 - protein, 47 aa, Artificial Sequence
  Quasi-synthetic sequence derived from human genome
LFFLWLWTSFNTAFLALQSLRFGFGFRRGRSFLLRSWHHLMKRVQIK

SEQ ID NO: 39266 - protein, 47 aa, Artificial Sequence
  Quasi-synthetic sequence derived from human genome
LVRGWLVRKRFLEQRAKIRLLHFTAAAYYHLNAVRIQRAYKLYLAVK

SEQ ID NO: 39267 - protein, 47 aa, Artificial Sequence
  Quasi-synthetic sequence derived from human genome
NPLKSIKYLICTRYKWLIIKIVLALLGLLMLGLFLYSLPGYMVKKLL

SEQ ID NO: 39268 - protein, 47 aa, Artificial Sequence
  Quasi-synthetic sequence derived from human genome
MKLKLNVLTIILLPVHLLITIYSALIFIPWYFLTNAKKKNAMAKRIK

SEQ ID NO: 39269 - protein, 47 aa, Artificial Sequence
  Quasi-synthetic sequence derived from human genome
RGYLARKAFAKRQQQLTAMKVLQRNCAAYLKLRNWQWWRLFTKVKPL

SEQ ID NO: 39270 - protein, 47 aa, Artificial Sequence
  Quasi-synthetic sequence derived from human genome
IVLLCVMNLIILVNLIHLFIFRKSNFIFDKLHKVGIKTRRQWRRSQF

SEQ ID NO: 39271 - protein, 47 aa, Artificial Sequence
  Quasi-synthetic sequence derived from human genome
LWGRRKCKPQMNYDKLSRALRYYYNKRILHKTKGKRFTYKFNFSKLI

SEQ ID NO: 39272 - protein, 47 aa, Artificial Sequence
  Quasi-synthetic sequence derived from human genome
RLWGRRKCKPQMNYDKLSRALRYYYNKRILHKTKGKRFTYKFNFNKL

SEQ ID NO: 39273 - protein, 47 aa, Artificial Sequence
  Quasi-synthetic sequence derived from human genome
LCWGALAAQLALLGLGLLHALLLVLLLCRLRRLRARARARAAARLSL

SEQ ID NO: 39274 - protein, 47 aa, Artificial Sequence
  Quasi-synthetic sequence derived from human genome
VLRRIILLQRWFRVLLCRQHFLHLRQASVIIQRFWRNYLNQKQVRDA

SEQ ID NO: 39275 - protein, 47 aa, Artificial Sequence
  Quasi-synthetic sequence derived from human genome
RAGVTLRVLRMMRIFWVIKLARHFIGLQTLGLTLKRCYREMVMLLVF

SEQ ID NO: 39276 - protein, 47 aa, Artificial Sequence
  Quasi-synthetic sequence derived from human genome
RKTCSQRRRRAMRAFRMLLYSKSTSLTFHWKLWGRHRGRRRGLAHPK

SEQ ID NO: 39277 - protein, 47 aa, Artificial Sequence
  Quasi-synthetic sequence derived from human genome
ARRGRRRTRAAGSLLSRAAILLFISAFLVRVPSSVGHLVRLPRAFRL

SEQ ID NO: 39278 - protein, 47 aa, Artificial Sequence
  Quasi-synthetic sequence derived from human genome
KAAINLAKLKLFRHYYVLIVCYIYFTRIIAFLLKLAVPFQWKWLYQL

SEQ ID NO: 39279 - protein, 47 aa, Artificial Sequence
  Quasi-synthetic sequence derived from human genome
MFYGRKIMRKVTTLPNTLVENTALPRQRARKRTKVLSLAKRILRFKK

SEQ ID NO: 39280 - protein, 47 aa, Artificial Sequence
  Quasi-synthetic sequence derived from human genome
QNDPRFIGNWWSGFLLCAIAMFLVIFPMFTFPKKLPPRHKKKKKKKF

SEQ ID NO: 39281 - protein, 47 aa, Artificial Sequence
  Quasi-synthetic sequence derived from human genome
KYLRKSLKIIYLNSIQELEIRNMSWPRLIRKLRCYLKEMKNLRKLVF

SEQ ID NO: 39282 - protein, 47 aa, Artificial Sequence
  Quasi-synthetic sequence derived from human genome
ILVTILCLLAAGFVVYLKRKTLIRLLFTNKKTTIEKLRCVRPSRPPR

SEQ ID NO: 39283 - protein, 47 aa, Artificial Sequence
  Quasi-synthetic sequence derived from human genome
RGYLARKAFAKRQQQLTAMKVIQRNCAAYLKLRNWQWWRLFTKVKPL

SEQ ID NO: 39284 - protein, 47 aa, Artificial Sequence
  Quasi-synthetic sequence derived from human genome
RIRISRVCHRWKRLVDDRWLWRHVDLTLYTMRPKVMWHLLRRYMASR

SEQ ID NO: 39285 - protein, 47 aa, Artificial Sequence
  Quasi-synthetic sequence derived from human genome
RLRHPRTRWKNWWVRGILTLAMIAFFFIIIYLGPMVLMIIVMCVQIK

SEQ ID NO: 39286 - protein, 47 aa, Artificial Sequence
  Quasi-synthetic sequence derived from human genome
RIHLKLHFTCQRILFLKPSCMLEVITWPIQAFVKRKVIIFLKKCLLC

SEQ ID NO: 39287 - protein, 47 aa, Artificial Sequence
  Quasi-synthetic sequence derived from human genome
RGRRRRMHVLRRRWDLGSLCRALLTRGLAALGHSLKHVLGAIFSKIF

SEQ ID NO: 39288 - protein, 47 aa, Artificial Sequence
  Quasi-synthetic sequence derived from human genome
RKAPLWLRAKFQRLLFKLGCYIQKNCGKFLVVGLLIFGAFAVGLKAA

SEQ ID NO: 39289 - protein, 47 aa, Artificial Sequence
  Quasi-synthetic sequence derived from human genome
WYYSLSQIKFSPVAKKLFVVTAVSAISVIFLAHHFKRKRGKKKGKIL

SEQ ID NO: 39290 - protein, 47 aa, Artificial Sequence
  Quasi-synthetic sequence derived from human genome
KQKMRQAWKSWLIYVVVRRTKLQMQTTALEFRQRIILRVWWSTWRQR

SEQ ID NO: 39291 - protein, 47 aa, Artificial Sequence
  Quasi-synthetic sequence derived from human genome
LLRSARRRRRGRTDGRRFLLRRAVPGHLGLARARVERAWLAAGLLKV

SEQ ID NO: 39292 - protein, 47 aa, Artificial Sequence
  Quasi-synthetic sequence derived from human genome
IIQCWWRLILSKILKKRRQAALEAFSRKEWAAVTLQSQARMWRIRRR

SEQ ID NO: 39293 - protein, 47 aa, Artificial Sequence
  Quasi-synthetic sequence derived from human genome
IVHARKKYRFHKTRSHVTHRTPKVKKSPKVRKKSYLSRLMLANRLPF

SEQ ID NO: 39294 - protein, 47 aa, Artificial Sequence
  Quasi-synthetic sequence derived from human genome
VWKRRILFFVVTLVSVFLVWKFTYAHKYLLADNRHYTFYVWKRVFQR

SEQ ID NO: 39295 - protein, 47 aa, Artificial Sequence
  Quasi-synthetic sequence derived from human genome
LSLPKYKKNLKALYVVHPTSFIKVLWNILKPLISHKFGKKVIYFNYL

SEQ ID NO: 39296 - protein, 47 aa, Artificial Sequence
  Quasi-synthetic sequence derived from human genome
RIPLVRNRRFQLCRCMNPRARKNRSQIALFQKLRFQFFCSMSGRAWV

SEQ ID NO: 39297 - protein, 47 aa, Artificial Sequence
  Quasi-synthetic sequence derived from human genome
KKCYQMIDRRLRKNLKSFIIVHPSWFIRTILAVTRPFISSKFSSKIK

SEQ ID NO: 39298 - protein, 47 aa, Artificial Sequence
  Quasi-synthetic sequence derived from human genome
KILRVLRVLRPLRAINRAKGLKHVVQCVFVAIRTIGNIVIVTTLLQF

SEQ ID NO: 39299 - protein, 47 aa, Artificial Sequence
  Quasi-synthetic sequence derived from human genome
FPIPRNSTVNIPLFRRFGRQRKIGGRGRIISPYRTPVLRRHRYSIFR

SEQ ID NO: 39300 - protein, 47 aa, Artificial Sequence
  Quasi-synthetic sequence derived from human genome
VILLLVDVVYIFFDIKLLRNIPRWTHLLRLLRLIILLRIFHLFHQKR

SEQ ID NO: 39301 - protein, 47 aa, Artificial Sequence
  Quasi-synthetic sequence derived from human genome
FFLIAVRLASLNQILDPWVYLLLRKILLRKFCQMRKRRLREQAPLLP

SEQ ID NO: 39302 - protein, 47 aa, Artificial Sequence
  Quasi-synthetic sequence derived from human genome
LLKELVRFQDRMYQKDPVKAKTKRRLVLGLREVLKHLKLKKLKCVII

SEQ ID NO: 39303 - protein, 47 aa, Artificial Sequence
  Quasi-synthetic sequence derived from human genome
LLQISKLKEVTLFVKRLRRKTYLSNMAKTMRMVLKSKRRVSVLKSDL

SEQ ID NO: 39304 - protein, 47 aa, Artificial Sequence
  Quasi-synthetic sequence derived from human genome
CVVLTFLGHRLLKRLLGPKLRRFLKPQGHPRLLLWFKRDPRPWSKEG

SEQ ID NO: 39305 - protein, 47 aa, Artificial Sequence
  Quasi-synthetic sequence derived from human genome
TLSMIAHLGVFPSKAERKITSRPFTRFRTAVRVVIAILRLRFLVKKW

SEQ ID NO: 39306 - protein, 47 aa, Artificial Sequence
  Quasi-synthetic sequence derived from human genome
PRARAFLAEVKQMRARRKTAKMLMVVLLVFALCYLPISVLNVLKRVF

SEQ ID NO: 39307 - protein, 47 aa, Artificial Sequence
  Quasi-synthetic sequence derived from human genome
INRPRTELKKKLFKRRRVLNRERRLRHRVVGAVIDQGLITRHHLKKR

SEQ ID NO: 39308 - protein, 47 aa, Artificial Sequence
  Quasi-synthetic sequence derived from human genome
LIRHHVLTWVKFIIGYLFPLLTMSICYLCLIFKVKKRSILISSRHFW

SEQ ID NO: 39309 - protein, 47 aa, Artificial Sequence
  Quasi-synthetic sequence derived from human genome
ISKDGLPGRVPLWVILLSAFAGLLLLMLLILALWKIGFFKRPLKKKM

SEQ ID NO: 39310 - protein, 47 aa, Artificial Sequence
  Quasi-synthetic sequence derived from human genome
LYMCHKCKKKQKSTKKFWIQKLPKVLCLHLKRFHWTAYLRNKVDTYV

SEQ ID NO: 39311 - protein, 47 aa, Artificial Sequence
  Quasi-synthetic sequence derived from human genome
PFKCLYYLIWKNYKKYIIIAFILIILIIFLVLFIYTLPGAISRRIVV

SEQ ID NO: 39312 - protein, 47 aa, Artificial Sequence
  Quasi-synthetic sequence derived from human genome
KVFLSSLKFHIRRFIFLFFILVIGIYPSGHSLILILGNPKLKQNAKK

SEQ ID NO: 39313 - protein, 47 aa, Artificial Sequence
  Quasi-synthetic sequence derived from human genome
RICSKLKAVLQKQGIWSEIHFILTNPRSLKHLCRLKIRKCMGRLHLR

SEQ ID NO: 39314 - protein, 47 aa, Artificial Sequence
  Quasi-synthetic sequence derived from human genome
VLGFLRVVRFVRILRIFKLTRHFVGLRVLGHTLRASTNEFLLLIIFL

SEQ ID NO: 39315 - protein, 47 aa, Artificial Sequence
  Quasi-synthetic sequence derived from human genome
LITKELYRSYVRTRGVGKVPRKKVNVKVFIIIAVFFICFVPFHFARI

SEQ ID NO: 39316 - protein, 47 aa, Artificial Sequence
  Quasi-synthetic sequence derived from human genome
KGKATGRKAPLWLRAKFQRLLFKLGCYIQKNCGKFLVVGLLIFGAFA

SEQ ID NO: 39317 - protein, 47 aa, Artificial Sequence
  Quasi-synthetic sequence derived from human genome
LLIISSILGSVWLAYKTPKLLRTARGRRIKKCATQLCRRCKTVCQFR

SEQ ID NO: 39318 - protein, 47 aa, Artificial Sequence
  Quasi-synthetic sequence derived from human genome
YSWRHFHTLRMTIFCLVLPLLVMAICYTGIIKTLLRCPSKKKYKAIR

SEQ ID NO: 39319 - protein, 47 aa, Artificial Sequence
  Quasi-synthetic sequence derived from human genome
LKMVGPGFLSLGLMMLVCGLVWVPIIKKKQKHRQKSNFLRSLKSFFL

SEQ ID NO: 39320 - protein, 47 aa, Artificial Sequence
  Quasi-synthetic sequence derived from human genome
RRRGFGLFFFLRLHRLLLLFLVLRGTLANKLNVPQVLLPFGREPGRV

SEQ ID NO: 39321 - protein, 47 aa, Artificial Sequence
  Quasi-synthetic sequence derived from human genome
KFMNELHKIPLPPWALIAIAIVAVLLVLTCCFCICKKCLFKKKNKKK

SEQ ID NO: 39322 - protein, 47 aa, Artificial Sequence
  Quasi-synthetic sequence derived from human genome
VTLLVYIKIYIVLRRRRKRVNTKRSSRAFRAHLRAPLKEAARRAQEL

SEQ ID NO: 39323 - protein, 47 aa, Artificial Sequence
  Quasi-synthetic sequence derived from human genome
RRKHAVAVIWAYWLGLKVRREYRKFFRANAGKKIYEFTLQRIVQKYF

SEQ ID NO: 39324 - protein, 47 aa, Artificial Sequence
  Quasi-synthetic sequence derived from human genome
SKRRMSVGQQTWALLCKNCLKKWRMKRQTLLEWLFSFLLVLFLYLFF

SEQ ID NO: 39325 - protein, 47 aa, Artificial Sequence
  Quasi-synthetic sequence derived from human genome
KLMRIKFQKILEERDALILIQWNIRAFMAVKNWPWMRLFFKIKPLVK

SEQ ID NO: 39326 - protein, 47 aa, Artificial Sequence
  Quasi-synthetic sequence derived from human genome
RYSFLKTASFFVRLGPMALAFKVRGLLDCKHSWKRLKDIRKIFPGKK

SEQ ID NO: 39327 - protein, 47 aa, Artificial Sequence
  Quasi-synthetic sequence derived from human genome
RRTLRKPKRVPSIYKLKLRPRIRPRRDHRPEKQPSRIPRPLAYVFLG

SEQ ID NO: 39328 - protein, 47 aa, Artificial Sequence
  Quasi-synthetic sequence derived from human genome
LFGFLLLYFPVFILYFKPSVFRCIALRWVRLLGFAIVYGTIILKLYR

SEQ ID NO: 39329 - protein, 47 aa, Artificial Sequence
  Quasi-synthetic sequence derived from human genome
RPKGYRKLLALGTWLLALLLTLPVMLAMRLVRRGPKSLCLPAWGPRA

SEQ ID NO: 39330 - protein, 47 aa, Artificial Sequence
  Quasi-synthetic sequence derived from human genome
FVRQIQLLLWKNWTLRKRQKIRFVVELVWPLSLFLVLIWLRNANPLY

SEQ ID NO: 39331 - protein, 47 aa, Artificial Sequence
  Quasi-synthetic sequence derived from human genome
IFVAIFWIVFLLLIVFYTAITKKIFKSHLKSSRNSTSVKKKSSRNIF

SEQ ID NO: 39332 - protein, 47 aa, Artificial Sequence
  Quasi-synthetic sequence derived from human genome
LILLLGSWALFFRRPKASLPRVFVLRALLMVLVFLLVVSYWLFYGVR

SEQ ID NO: 39333 - protein, 47 aa, Artificial Sequence
  Quasi-synthetic sequence derived from human genome
LAPWPRPPPRRFSPPRRMLPPPPMWRRSPPRMRRRSRSPRRRSPVRR

SEQ ID NO: 39334 - protein, 47 aa, Artificial Sequence
  Quasi-synthetic sequence derived from human genome
LVSPKWKNFKGLKLLCRDKIRLNNAIWRAWYIQYVKRRKSPVCGFVT

SEQ ID NO: 39335 - protein, 47 aa, Artificial Sequence
  Quasi-synthetic sequence derived from human genome
VWPALWELYRELGLFQGPALGLRNHLGRKLRRRKKKKAKRTTNWKII

SEQ ID NO: 39336 - protein, 47 aa, Artificial Sequence
  Quasi-synthetic sequence derived from human genome
RIARFRFRAFHFLNRFPSVYLRCKMVVCRAYDPSSRCYRGCVLRSKR

SEQ ID NO: 39337 - protein, 47 aa, Artificial Sequence
  Quasi-synthetic sequence derived from human genome
KVIKTRYRIVKKTPASPLSAPPFPLSLPSWRARRLSLSRSLVLNRLR

SEQ ID NO: 39338 - protein, 47 aa, Artificial Sequence
  Quasi-synthetic sequence derived from human genome
LKGKKCIVLVTELMTSGTLKTYLKRFKVMKPKVLRSWCRQILKGLQF

SEQ ID NO: 39339 - protein, 47 aa, Artificial Sequence
  Quasi-synthetic sequence derived from human genome
TLFRSRSKRRHRTVKLIFAIVVAYFLSWGPYNFTLFLQTLFRTQIIR

SEQ ID NO: 39340 - protein, 47 aa, Artificial Sequence
  Quasi-synthetic sequence derived from human genome
KSKFSRYWRRWNRFCRRKCRAAVKSNVFYWLVIFLVFLNTLTIASEH

SEQ ID NO: 39341 - protein, 47 aa, Artificial Sequence
  Quasi-synthetic sequence derived from human genome
FYRNKLKYLAFLRKRMNTNPSRGPYHFRAPSRIFWRTVRGMLPHKTK

SEQ ID NO: 39342 - protein, 47 aa, Artificial Sequence
  Quasi-synthetic sequence derived from human genome
RLPSVENRPKIAAFLPARQLWKWFGKPTQRRGMKGKARKLFYKAIVR

SEQ ID NO: 39343 - protein, 47 aa, Artificial Sequence
  Quasi-synthetic sequence derived from human genome
IVHARKKYRFHKTRSHVTHRTTKVKKSPKVRKKSYLSRLMLANRLPF

SEQ ID NO: 39344 - protein, 47 aa, Artificial Sequence
  Quasi-synthetic sequence derived from human genome
FWKHFLTLKMNISVLVLPLFIFTFLYVQMRKTLRFREQRYSLFKLVF

SEQ ID NO: 39345 - protein, 47 aa, Artificial Sequence
  Quasi-synthetic sequence derived from human genome
KYKKFPHWLDKWMLTRKQFGLLSLFFAVLHAIYTLSYAMRRSYRYKL

SEQ ID NO: 39346 - protein, 47 aa, Artificial Sequence
  Quasi-synthetic sequence derived from human genome
IEWKTLQKKKQQKIKEKLRIRTKAAVKIQAWWRGTLVRRTLLHAALR

SEQ ID NO: 39347 - protein, 47 aa, Artificial Sequence
  Quasi-synthetic sequence derived from human genome
IIFSYPSTHPFILILGNKKLKQIFLSVLRHVRYWVKDRSLRLHRFTR

SEQ ID NO: 39348 - protein, 47 aa, Artificial Sequence
  Quasi-synthetic sequence derived from human genome
LPKYWDYRYKKNLKALYVVHPTSFIKVLWNILKPLISHKFGKKVIYF

SEQ ID NO: 39349 - protein, 47 aa, Artificial Sequence
  Quasi-synthetic sequence derived from human genome
ALLKVKFDQKKRVKLAQGLWLMNWFSVLAGIIIFSLGLFLKIELRKR

SEQ ID NO: 39350 - protein, 47 aa, Artificial Sequence
  Quasi-synthetic sequence derived from human genome
WLLLVLVLVLLVSPRGCRARRGLRGLLMAHSQRLLFRIGYSLYTRTW

SEQ ID NO: 39351 - protein, 47 aa, Artificial Sequence
  Quasi-synthetic sequence derived from human genome
IMRNILGLVLPLLIMVICYSGILKTLLRCRNEKKRHRAVRVIFTIMI

SEQ ID NO: 39352 - protein, 47 aa, Artificial Sequence
  Quasi-synthetic sequence derived from human genome
NLTWIQYHSLDVIAFLLACVATVIFIITKFCLFCFRKLAKKGKKKKR

SEQ ID NO: 39353 - protein, 47 aa, Artificial Sequence
  Quasi-synthetic sequence derived from human genome
KYKKFPHWLDKWMLTRKQFGLLSFFFAVLHAIYSLSYPMRRSYRYKL

SEQ ID NO: 39354 - protein, 47 aa, Artificial Sequence
  Quasi-synthetic sequence derived from human genome
LIRAKLLREGWVHANRPKRLLLVLVSAFFIFWSPFNVVLLVHLWRRV

SEQ ID NO: 39355 - protein, 47 aa, Artificial Sequence
  Quasi-synthetic sequence derived from human genome
IKPGIKIFRFVAPLYYINKECFKSALYKQTVNPILIKVAWKKAAKRK

SEQ ID NO: 39356 - protein, 47 aa, Artificial Sequence
  Quasi-synthetic sequence derived from human genome
TLIQRHWRGHNCRKNYGLMRLGFLRLQALHRSRKLHQQYRLARQRII

SEQ ID NO: 39357 - protein, 47 aa, Artificial Sequence
  Quasi-synthetic sequence derived from human genome
MYVMMAQILRSHLIKATVIPNRVKMLPYFGIIRNRMMSTHKSKKKIR

SEQ ID NO: 39358 - protein, 47 aa, Artificial Sequence
  Quasi-synthetic sequence derived from human genome
WRVLVGVGVPVVFIIILVLCLRLLQSRCPRVLPKKLQNWNFLPLWMR

SEQ ID NO: 39359 - protein, 47 aa, Artificial Sequence
  Quasi-synthetic sequence derived from human genome
LALSDLIQKYFVSPTLFRVIRLARIGRVLRLIRGAKGIRTLLFALMM

SEQ ID NO: 39360 - protein, 47 aa, Artificial Sequence
  Quasi-synthetic sequence derived from human genome
VVKMRKEVKRIRVLVIRKLVRSVGRLKSKKGTEDALLKNQRRAQRLL

SEQ ID NO: 39361 - protein, 47 aa, Artificial Sequence
  Quasi-synthetic sequence derived from human genome
ILIILTGRHRGKRVVFLKQLASGLLLVTGPLVLNRVPLRRTHQKFVI

SEQ ID NO: 39362 - protein, 47 aa, Artificial Sequence
  Quasi-synthetic sequence derived from human genome
IKALVKPKEVKPKIPKGVSRKLDRLAYIAHPKLGKRARARIAKGLRL

SEQ ID NO: 39363 - protein, 47 aa, Artificial Sequence
  Quasi-synthetic sequence derived from human genome
KMMQRRPRSAEVKYFYFFKILLRLRLAILKYLFIDDKGILFVSSRKH

SEQ ID NO: 39364 - protein, 47 aa, Artificial Sequence
  Quasi-synthetic sequence derived from human genome
KMRKTIGGVALWRQQICAIARVRLLKLKHERKALLALLLILMAGFCP

SEQ ID NO: 39365 - protein, 47 aa, Artificial Sequence
  Quasi-synthetic sequence derived from human genome
MRFLLRVRCWQYRQLSALHRAPRPTRPDKARRLGYKAKQGYVIYRIR

SEQ ID NO: 39366 - protein, 47 aa, Artificial Sequence
  Quasi-synthetic sequence derived from human genome
ILLWYPVPCTRLPIRMAKALGKRTAKYRWFAVLYLLVCFLLLPSLVF

SEQ ID NO: 39367 - protein, 47 aa, Artificial Sequence
  Quasi-synthetic sequence derived from human genome
LIPTILGLFLLALLGLVVKRAVERRKALSRRARRLAVRMRALESSQR

SEQ ID NO: 39368 - protein, 47 aa, Artificial Sequence
  Quasi-synthetic sequence derived from human genome
LRTAMRRQMRRHASRRGPSRRRLGRLWNRLFHRPRAPRGQIPLLTAA

SEQ ID NO: 39369 - protein, 47 aa, Artificial Sequence
  Quasi-synthetic sequence derived from human genome
NFVYKLFSLQDLLLLVRCSVQRIETRPRSKKRKKIRRQFPVYVLPKV

SEQ ID NO: 39370 - protein, 47 aa, Artificial Sequence
  Quasi-synthetic sequence derived from human genome
KVFQCGKYLKVFYKFLNSNRHTIRHTGKKCFKCKKCVKSFCIRLHKT

SEQ ID NO: 39371 - protein, 47 aa, Artificial Sequence
  Quasi-synthetic sequence derived from human genome
LRLQIIQRERRRKELFRKKNKAAAVIQRAWRSYQLRKHLSHLRHMKQ

SEQ ID NO: 39372 - protein, 47 aa, Artificial Sequence
  Quasi-synthetic sequence derived from human genome
LLIVVKVRSAGRRVWAPSCQRRRRSERRVTRMVVAVVALFVLCWMPF

SEQ ID NO: 39373 - protein, 47 aa, Artificial Sequence
  Quasi-synthetic sequence derived from human genome
GGFKKFYFHQHLCILKAKLGRPVTWNRQLRHFQGRKKALQIQKTWIK

SEQ ID NO: 39374 - protein, 47 aa, Artificial Sequence
  Quasi-synthetic sequence derived from human genome
LGFLRVVRFVRILRIFKLTRHFVGLRVLGHTLRASTNEFLLLIIFLA

SEQ ID NO: 39375 - protein, 47 aa, Artificial Sequence
  Quasi-synthetic sequence derived from human genome
IIQCWWRMTLSRVLEKKRQAALIAYATRERAVIKLQSLVRMWRVRWR

SEQ ID NO: 39376 - protein, 47 aa, Artificial Sequence
  Quasi-synthetic sequence derived from human genome
HREVVRKILLLQSWFRMVLERRHFLQMKRAAVTIQACWRSYRVRRAL

SEQ ID NO: 39377 - protein, 47 aa, Artificial Sequence
  Quasi-synthetic sequence derived from human genome
MRPRSGGRPGATGRRRRRLRRRPRGLRCSRLPPPPPLPLLLGLLLAA

SEQ ID NO: 39378 - protein, 47 aa, Artificial Sequence
  Quasi-synthetic sequence derived from human genome
VKIQAWWRGTLVRRTLLHAALRAWIIQCWWRMTLSRVLEKKRQAALI

SEQ ID NO: 39379 - protein, 47 aa, Artificial Sequence
  Quasi-synthetic sequence derived from human genome
RLRFGPRRALAALVRRGWRCGYLECSAKYNWHVLRLFRELLRCALVR

SEQ ID NO: 39380 - protein, 47 aa, Artificial Sequence
  Quasi-synthetic sequence derived from human genome
KVGQVLRVMRLMRIFRILKLARHSTGLRAFGFTLRQCYQQVGCLLLF

SEQ ID NO: 39381 - protein, 47 aa, Artificial Sequence
  Quasi-synthetic sequence derived from human genome
LKKNKIHSLPDKVFIKYTKLKKIFLQHNCIRHISRKAFFGLCNLQIL

SEQ ID NO: 39382 - protein, 47 aa, Artificial Sequence
  Quasi-synthetic sequence derived from human genome
FLERRLQTQVFKLGLAKSIHHARVLIRQRHIRVRKQVVNIPSFIVRL

SEQ ID NO: 39383 - protein, 47 aa, Artificial Sequence
  Quasi-synthetic sequence derived from human genome
EKQKECNFFLIAVRLASLNQILDPWVYLLLRKILLRKFCQMRKRRLR

SEQ ID NO: 39384 - protein, 47 aa, Artificial Sequence
  Quasi-synthetic sequence derived from human genome
KVGLVLRVLRALRILYVMRLARHSLGLQTLGLTVRRCTREFGLLLLF

SEQ ID NO: 39385 - protein, 47 aa, Artificial Sequence
  Quasi-synthetic sequence derived from human genome
KRKFKSLLLHKRTAIQHAYRLLISQRRPAGISYRQFEGLMRFYKPRM

SEQ ID NO: 39386 - protein, 47 aa, Artificial Sequence
  Quasi-synthetic sequence derived from human genome
LLAILLVVAVFCILWNWNKRKKRQVPYLRVTVMPLLTLPQTRQRAKN

SEQ ID NO: 39387 - protein, 47 aa, Artificial Sequence
  Quasi-synthetic sequence derived from human genome
LGKKVLNLLKGAFPARLKKVLIVGAPIWFRVPYSIISLLLKDKVRER

SEQ ID NO: 39388 - protein, 47 aa, Artificial Sequence
  Quasi-synthetic sequence derived from human genome
LKRNMMPWALQKKREIHMAKAHRRRAARSALPMRLTSCIFRRPVTRI

SEQ ID NO: 39389 - protein, 47 aa, Artificial Sequence
  Quasi-synthetic sequence derived from human genome
VAHKVFATTSIKSFFRQLNLYGFRKRRQCTFRTFTRIFSAKRLVSIL

SEQ ID NO: 39390 - protein, 47 aa, Artificial Sequence
  Quasi-synthetic sequence derived from human genome
LLFVFIYVQLWLVLRYRHKRLSYQSVFLFLCLFWASLRTVLFSFYFK

SEQ ID NO: 39391 - protein, 47 aa, Artificial Sequence
  Quasi-synthetic sequence derived from human genome
LRHVPLRKVHLFTIIQMSCLGLLWIIKVSRAAIVFPMMVLALVFVRK

SEQ ID NO: 39392 - protein, 47 aa, Artificial Sequence
  Quasi-synthetic sequence derived from human genome
FQRALCLLCFYLKYLNMYASICFLTCISLQRCFFLLKPFRARDWKRR

SEQ ID NO: 39393 - protein, 47 aa, Artificial Sequence
  Quasi-synthetic sequence derived from human genome
RRHCRTLRQRSRRPKMRPARRRGGRRQLLLRALDAVATCWEKLFALR

SEQ ID NO: 39394 - protein, 47 aa, Artificial Sequence
  Quasi-synthetic sequence derived from human genome
MGKLIRMGPQERWLLRTKRLHWSRLLFLLGMLIIGSTYQHLRRPRGL

SEQ ID NO: 39395 - protein, 47 aa, Artificial Sequence
  Quasi-synthetic sequence derived from human genome
NIIHILQIRKLRHRLSNFPRLPGILAPETVLLPFCYKVFRKKEKVKR

SEQ ID NO: 39396 - protein, 47 aa, Artificial Sequence
  Quasi-synthetic sequence derived from human genome
RRKEILAKYPAIKALMRPDPRLKWAVLVLVLVQMLACWLVRGLAWRW

SEQ ID NO: 39397 - protein, 47 aa, Artificial Sequence
  Quasi-synthetic sequence derived from human genome
PKGMWICQVCRPKKKGRKLLHEKAAQIKRRYAKPIGRPKNKLKQRLL

SEQ ID NO: 39398 - protein, 47 aa, Artificial Sequence
  Quasi-synthetic sequence derived from human genome
LTLLIPYLLGRKRRWSKCKIRVFVGGQINRMDQERKAIISLLSKFRL

SEQ ID NO: 39399 - protein, 47 aa, Artificial Sequence
  Quasi-synthetic sequence derived from human genome
AKVAARMVWRLLHGQVLTRRERRRLLRTCVDFFRLVPFMVFLIVPFM

SEQ ID NO: 39400 - protein, 47 aa, Artificial Sequence
  Quasi-synthetic sequence derived from human genome
MKHFLRMLIQVCLYFYCKFLWRCLKFVMRKLTGRCELQRICYNTKPG

SEQ ID NO: 39401 - protein, 47 aa, Artificial Sequence
  Quasi-synthetic sequence derived from human genome
RLFSKVLVTIKKVYMKERSFKGVEFGKNLGLKSSLIRKPRIVSRGRR

SEQ ID NO: 39402 - protein, 47 aa, Artificial Sequence
  Quasi-synthetic sequence derived from human genome
CRLASHCLAYANSCLNPLVYALASRHFRARFRRLWPCGRRRRHRARR

SEQ ID NO: 39403 - protein, 47 aa, Artificial Sequence
  Quasi-synthetic sequence derived from human genome
RKFFLFYRQQKWASGVIAIAWLLYCHKTRLKKILKESRQRHLENFRI

SEQ ID NO: 39404 - protein, 47 aa, Artificial Sequence
  Quasi-synthetic sequence derived from human genome
CIPRSFRRHIRQHSALTRLRLRNVFRRFLRDFQPGRLSQQMVMVKYL

SEQ ID NO: 39405 - protein, 47 aa, Artificial Sequence
  Quasi-synthetic sequence derived from human genome
LAFRKAKIRDRVSKLLASVILLPWPPKVLGLKNVTGRLLVGLRWWNQ

SEQ ID NO: 39406 - protein, 47 aa, Artificial Sequence
  Quasi-synthetic sequence derived from human genome
KILGVLRVLRLLRTLRPLRVISRAPGLKLVVETLISSLRPIGNIVLI

SEQ ID NO: 39407 - protein, 47 aa, Artificial Sequence
  Quasi-synthetic sequence derived from human genome
PSLVRPRVFIKDMAPGKVVPMNCWGVYQAVRWLRWKASLIKLRALRR

SEQ ID NO: 39408 - protein, 47 aa, Artificial Sequence
  Quasi-synthetic sequence derived from human genome
LNRAACHLKLKNLHKAIEDSSKAYRIMKRHLRLIHPTKLYKLMLRRF

SEQ ID NO: 39409 - protein, 47 aa, Artificial Sequence
  Quasi-synthetic sequence derived from human genome
VRRVVQIFRIMRILRILKLARHSTGLQSLGFTLRRSYNELGLLILFL

SEQ ID NO: 39410 - protein, 47 aa, Artificial Sequence
  Quasi-synthetic sequence derived from human genome
KFFLYVCMYVCIREKILLYKTHWMTPIFLKVVINTRRIKHHFKIHVP

SEQ ID NO: 39411 - protein, 47 aa, Artificial Sequence
  Quasi-synthetic sequence derived from human genome
LALRRRLGQLSCMSRPALKLRSWPLTVLYYLLPFGALRPLSRVGWRP

SEQ ID NO: 39412 - protein, 47 aa, Artificial Sequence
  Quasi-synthetic sequence derived from human genome
RHFPRFYVLYTIFMKGLQMLWADAKKARRIKTNMWKHNIKFHQLPYR

SEQ ID NO: 39413 - protein, 47 aa, Artificial Sequence
  Quasi-synthetic sequence derived from human genome
AFDRFLKIIRPLRNIFLKKPVFAKTVSIFIWFFLFFISLPNTILSNK

SEQ ID NO: 39414 - protein, 47 aa, Artificial Sequence
  Quasi-synthetic sequence derived from human genome
LKSVQLFSKKFKLWLLNALEGVPALLQISKLKEVTLFVKRLRRKTYL

SEQ ID NO: 39415 - protein, 47 aa, Artificial Sequence
  Quasi-synthetic sequence derived from human genome
LFTAALWGALAALFCLQYLGVRVLLRFQRKLSVLLLLLGRRRVDFRL

SEQ ID NO: 39416 - protein, 47 aa, Artificial Sequence
  Quasi-synthetic sequence derived from human genome
RLRELRIRCVARKFLYLWIRMTFGRVFPSKARFYYEQRLLRKVFEEW

SEQ ID NO: 39417 - protein, 47 aa, Artificial Sequence
  Quasi-synthetic sequence derived from human genome
QRRMFHATVATQTQFFHVKVLNINLKRKFIKKRIIIISNYSKRNSLL

SEQ ID NO: 39418 - protein, 47 aa, Artificial Sequence
  Quasi-synthetic sequence derived from human genome
LVLGFVLPVCTICVLYTDLLRRLRAVRLRSGAKALGKARRKVTVLVL

SEQ ID NO: 39419 - protein, 47 aa, Artificial Sequence
  Quasi-synthetic sequence derived from human genome
RPWPRWLGVAALGLAAVALGTVAWRRAWPRRRRRLQQVGTVAKLWIY

SEQ ID NO: 39420 - protein, 47 aa, Artificial Sequence
  Quasi-synthetic sequence derived from human genome
RLRVQQAALRAARLRHQELFRLRGIKAQVALRLAELARRQRRRQARR

SEQ ID NO: 39421 - protein, 47 aa, Artificial Sequence
  Quasi-synthetic sequence derived from human genome
LVLPLLVMVICYSGILKTLLRCRNEKKRHRAVRLIFTIMIVYFLFWA

SEQ ID NO: 39422 - protein, 47 aa, Artificial Sequence
  Quasi-synthetic sequence derived from human genome
VYRRRFVQQKRAAITLQHYFRTWQTRKQFLLYRKAAVVLQNHYRAFL

SEQ ID NO: 39423 - protein, 47 aa, Artificial Sequence
  Quasi-synthetic sequence derived from human genome
RVSRLGRRLGRRRRPRSPPEPLRVRARLRLRSPSGAFAALGALVVLV

SEQ ID NO: 39424 - protein, 47 aa, Artificial Sequence
  Quasi-synthetic sequence derived from human genome
IIIQRKWRAILPAKIAHEHFLMIKRHRAACLIQAHYRGYKGRQVFLR

SEQ ID NO: 39425 - protein, 47 aa, Artificial Sequence
  Quasi-synthetic sequence derived from human genome
PRKLLSHGKKPFSQHVRKLRASITPGTILIILTGRHRGKRVVFLKQL

SEQ ID NO: 39426 - protein, 47 aa, Artificial Sequence
  Quasi-synthetic sequence derived from human genome
IRRSVQISVLLPAVNIRRRIKLTFPQPARPRAPRSLCLWQTWFAGKR

SEQ ID NO: 39427 - protein, 47 aa, Artificial Sequence
  Quasi-synthetic sequence derived from human genome
PTNGPKIPSIATGMVGALLLLLVVALGIGLFMRRRHIVRKRTLRRLL

SEQ ID NO: 39428 - protein, 47 aa, Artificial Sequence
  Quasi-synthetic sequence derived from human genome
RSNFLKLKNAATLIQRHWRGHNCRKNYGLMRLGFLRLQALHRSRKLH

SEQ ID NO: 39429 - protein, 47 aa, Artificial Sequence
  Quasi-synthetic sequence derived from human genome
SFLVLQRRRLPPVRPHGPGPARGRPPHPALPHRRRLHGRPVRRLFLL

SEQ ID NO: 39430 - protein, 47 aa, Artificial Sequence
  Quasi-synthetic sequence derived from human genome
MKKQRKILWRKGIHLAFSEKWNTGFGGFKKFYFHQHLCILKAKLGRP

SEQ ID NO: 39431 - protein, 47 aa, Artificial Sequence
  Quasi-synthetic sequence derived from human genome
MKATGKLYACKKLNKKRLKKRKGYQGAMVEKKILMKVHSRFIVSLAY

SEQ ID NO: 39432 - protein, 47 aa, Artificial Sequence
  Quasi-synthetic sequence derived from human genome
PKSVWYRIAFWLQWFNSFVNPLLYPLCHKRFQKAFLKIFCIKKQPLP

SEQ ID NO: 39433 - protein, 47 aa, Artificial Sequence
  Quasi-synthetic sequence derived from human genome
LVAGVLVLLVSLGVAIHLCCRRRRARLRFMKQKFNIVCLKISGFTTC

SEQ ID NO: 39434 - protein, 47 aa, Artificial Sequence
  Quasi-synthetic sequence derived from human genome
LLGRLAAIVAKQVLLGRKVVVVRCEGINISGNFYRNKLKYLAFLRKR

SEQ ID NO: 39435 - protein, 47 aa, Artificial Sequence
  Quasi-synthetic sequence derived from human genome
DLFYLRGDRGQILVICLIAVMVVFIILVIGVCTCCHPLRKRRKRKKK

SEQ ID NO: 39436 - protein, 47 aa, Artificial Sequence
  Quasi-synthetic sequence derived from human genome
LYYRRAHRRFVTKKALCIRVFQETQKLKKRRRALKAAAAAQKQAKRR

SEQ ID NO: 39437 - protein, 47 aa, Artificial Sequence
  Quasi-synthetic sequence derived from human genome
VGLSGLSSKAAKDVLGFLRVVRFVRILRIFKLTRHFVGLRVLGHTLR

SEQ ID NO: 39438 - protein, 47 aa, Artificial Sequence
  Quasi-synthetic sequence derived from human genome
LTQTMKLLKLRRNIVKLSLYRHFTNTLILAVAASIVFIIWTTMKFRI

SEQ ID NO: 39439 - protein, 47 aa, Artificial Sequence
  Quasi-synthetic sequence derived from human genome
VKKNTLKKYKIACIVLLALLVIMSLGLGLGLGLRKLEKQGSCRKKCF

SEQ ID NO: 39440 - protein, 47 aa, Artificial Sequence
  Quasi-synthetic sequence derived from human genome
RWHWQKKVINKGLFFLGSLIAISSTYLLIHYMSPRSFLRLRRPWNWI

SEQ ID NO: 39441 - protein, 47 aa, Artificial Sequence
  Quasi-synthetic sequence derived from human genome
RGYLARRAFQKRQQQQSALRVMQRNCAAYLKLRHWQWWRLFTKVKPL

SEQ ID NO: 39442 - protein, 47 aa, Artificial Sequence
  Quasi-synthetic sequence derived from human genome
RRRNTPFHERFFRFLLRKLYVFRRSFLMTCISLRNLILGRPSLEQLA

SEQ ID NO: 39443 - protein, 47 aa, Artificial Sequence
  Quasi-synthetic sequence derived from human genome
WRGALARKAIQRRKWAVRIIRKFIKGFISRNKPLCPDNEEFIVFVRK

SEQ ID NO: 39444 - protein, 47 aa, Artificial Sequence
  Quasi-synthetic sequence derived from human genome
ALSTIVSQRKQIKRKAPRGFLKRVFKRKKPQLRLEKSGDLLVRFHPF

SEQ ID NO: 39445 - protein, 47 aa, Artificial Sequence
  Quasi-synthetic sequence derived from human genome
RHPRVFAWVYRHQARHKAVVLRCHAVLLARAHKARALARLLRQTALA

SEQ ID NO: 39446 - protein, 47 aa, Artificial Sequence
  Quasi-synthetic sequence derived from human genome
RVEIVAAMRRIRYEFKAKNIKKKKVSIMVSVDGVKVILKKKKKKKEW

SEQ ID NO: 39447 - protein, 47 aa, Artificial Sequence
  Quasi-synthetic sequence derived from human genome
RAGITAAINLAKLKLFRHYYVLIVCYIYFTRIIAFLLKLAVPFQWKW

SEQ ID NO: 39448 - protein, 47 aa, Artificial Sequence
  Quasi-synthetic sequence derived from human genome
KYVKVFHKYSNSNRYKIRHTKKKTFKCMKCSKSFFMLSHLIQHKRIH

SEQ ID NO: 39449 - protein, 47 aa, Artificial Sequence
  Quasi-synthetic sequence derived from human genome
HIPLRPKHWFQLCRPMNPRARKNCSQIALFQKRRFQFFCSMRCRAWV

SEQ ID NO: 39450 - protein, 47 aa, Artificial Sequence
  Quasi-synthetic sequence derived from human genome
HKIIAGSVALFLSVAMILLVIYVSWKRYPASMKQLQQHSLMKRRRKK

SEQ ID NO: 39451 - protein, 47 aa, Artificial Sequence
  Quasi-synthetic sequence derived from human genome
GRTAKPAHIAKVKMKFRFLGKLMAKAIMDFRLVDLPLGLPFYKWMLR

SEQ ID NO: 39452 - protein, 47 aa, Artificial Sequence
  Quasi-synthetic sequence derived from human genome
FRRKEKMFRFFIRRMVKAQSFYWVVLCVVALNTLCVAMVHYNQPRRL

SEQ ID NO: 39453 - protein, 47 aa, Artificial Sequence
  Quasi-synthetic sequence derived from human genome
KYFMKLVNLYKGAVLYLLRGRKTFLIPVLFNNYITAALKLLEKLYKV

SEQ ID NO: 39454 - protein, 47 aa, Artificial Sequence
  Quasi-synthetic sequence derived from human genome
RFYTPPNFVLALVLPSIVILGKIILFLPCISRKLKRIKKGWEKSQFL

SEQ ID NO: 39455 - protein, 47 aa, Artificial Sequence
  Quasi-synthetic sequence derived from human genome
LISFGIQSSAINVVKILRVLRVLRPLRAINRAKGLKHVVQCVFVAIR

SEQ ID NO: 39456 - protein, 47 aa, Artificial Sequence
  Quasi-synthetic sequence derived from human genome
TLQMVLQRRKFLQMKRRKYGFIYKTHLFGRPTVRVMGADNVRRILLG

SEQ ID NO: 39457 - protein, 47 aa, Artificial Sequence
  Quasi-synthetic sequence derived from human genome
IRLVRVFRIFKLSRHSKGLQILGKTLQASMRELGLLIFFLFIGVILF

SEQ ID NO: 39458 - protein, 47 aa, Artificial Sequence
  Quasi-synthetic sequence derived from human genome
KNNRQKVSGILQRVLLLFRAAQCSFPVAQWYILQLRWARKVMQKIRM

SEQ ID NO: 39459 - protein, 47 aa, Artificial Sequence
  Quasi-synthetic sequence derived from human genome
LRTALRGAPRLLSRVQPRAPCLRRLWGRGARPEVAGRRRAWAWGWRR

SEQ ID NO: 39460 - protein, 47 aa, Artificial Sequence
  Quasi-synthetic sequence derived from human genome
WRRRKSLWLALSASWLLLVLLGGFSLLRLALPPRPRPGASQGWPRWL

SEQ ID NO: 39461 - protein, 47 aa, Artificial Sequence
  Quasi-synthetic sequence derived from human genome
KLPWTQVGFSLLFLYLGSGGWRFIRVFIKTIRRDIFGGLVLLKVKAK

SEQ ID NO: 39462 - protein, 47 aa, Artificial Sequence
  Quasi-synthetic sequence derived from human genome
LLRFPSRYWLGAYQLQRVVLAFMVPLGVITTSYLLLLAFLQRRQRRR

SEQ ID NO: 39463 - protein, 47 aa, Artificial Sequence
  Quasi-synthetic sequence derived from human genome
VLRFKYLLKQALATGMRRGLLARPLNSKARGATGSFKLVPKHKKKIQ

SEQ ID NO: 39464 - protein, 47 aa, Artificial Sequence
  Quasi-synthetic sequence derived from human genome
RWRRLRLQQLRRLRGLLRVLRGRPGAGSRRRGRMALCGQAAGAASLP

SEQ ID NO: 39465 - protein, 47 aa, Artificial Sequence
  Quasi-synthetic sequence derived from human genome
RMKHLKTLPMVPFKTKDSPGVFSKLGVLLRRVTRNLVRNKLAVITRL

SEQ ID NO: 39466 - protein, 47 aa, Artificial Sequence
  Quasi-synthetic sequence derived from human genome
LVLKNRSLKLQKMKYRPPKTKFFFTVIPQPIFLSPGITLTLPIVFRP

SEQ ID NO: 39467 - protein, 47 aa, Artificial Sequence
  Quasi-synthetic sequence derived from human genome
ILLPLHRPSWATWLDFLILKVAVGTRLHRVPVKIKRMCVNGLCRARK

SEQ ID NO: 39468 - protein, 47 aa, Artificial Sequence
  Quasi-synthetic sequence derived from human genome
WLQKVKYHRLKGATLTLQRYCRGHLARRLAEHLRRIRAAVVLQKHYR

SEQ ID NO: 39469 - protein, 47 aa, Artificial Sequence
  Quasi-synthetic sequence derived from human genome
VFLNHSNLWFAAWLKVFYCLRIANFNHPLFFLMKRKIIVLMPWLLRL

SEQ ID NO: 39470 - protein, 47 aa, Artificial Sequence
  Quasi-synthetic sequence derived from human genome
KRGVRTLHQRFLAQLRKYFNMRVFRQRTYRIWAFGIAAAALGYFVPY

SEQ ID NO: 39471 - protein, 47 aa, Artificial Sequence
  Quasi-synthetic sequence derived from human genome
RSIAIIVPLVLLVTLITTLVIGLVLCKRKRRTKTIRRQPIINGGINV

SEQ ID NO: 39472 - protein, 47 aa, Artificial Sequence
  Quasi-synthetic sequence derived from human genome
AVRSLLSPGLLPHLLPALGFKNKTVLKKRCKDCYLVKRRGRWYVYCK

SEQ ID NO: 39473 - protein, 47 aa, Artificial Sequence
  Quasi-synthetic sequence derived from human genome
LCGQSFRGWVALVLHLRAHSAAKRPIACPKCERRFWRRKQLRAHLRR

SEQ ID NO: 39474 - protein, 47 aa, Artificial Sequence
  Quasi-synthetic sequence derived from human genome
KVKKIWQKQFRWPKNRLQILKFCKAREDLLKIQKERDFHRMHHKRIV

SEQ ID NO: 39475 - protein, 47 aa, Artificial Sequence
  Quasi-synthetic sequence derived from human genome
KLRPDNLALIQLTVIMGYLRIIRFLPLFKIIVPILIRIADVQIKKRL

SEQ ID NO: 39476 - protein, 47 aa, Artificial Sequence
  Quasi-synthetic sequence derived from human genome
KLWSFFIYLLRRQIRTVIQYQTVRYDILPLSPVSRNRLAQVKRKILV

SEQ ID NO: 39477 - protein, 47 aa, Artificial Sequence
  Quasi-synthetic sequence derived from human genome
NKPVFMFCKAIRFSYPSIHPFILIWGNKKLKQTFLSVLRQVRYWVKG

SEQ ID NO: 39478 - protein, 47 aa, Artificial Sequence
  Quasi-synthetic sequence derived from human genome
HKTFKIKQFLAKKQKQNRPIPQWIRMKTGNKIRYNSKRRHWKRTKLG

SEQ ID NO: 39479 - protein, 47 aa, Artificial Sequence
  Quasi-synthetic sequence derived from human genome
IFTGTVLSDIIQKYFFSPTLFRVIRLARIGRILRLIRGAKGIRTLLF

SEQ ID NO: 39480 - protein, 47 aa, Artificial Sequence
  Quasi-synthetic sequence derived from human genome
RKAIIIFVPVPQLKSFQKIQVRLVRELEKKFSGKHVVFIAQRRILPK

SEQ ID NO: 39481 - protein, 47 aa, Artificial Sequence
  Quasi-synthetic sequence derived from human genome
KLCSRFLLKCGFITIPWRCIKKCSPLMPRAAVPRFVQQKLYLFLQHC

SEQ ID NO: 39482 - protein, 47 aa, Artificial Sequence
  Quasi-synthetic sequence derived from human genome
LRILHISVMGGMIALLLSILCLVMILYTRRRWCKRRRVPQPQKSASA

SEQ ID NO: 39483 - protein, 47 aa, Artificial Sequence
  Quasi-synthetic sequence derived from human genome
LCYLLIVGKMRAVALRAGWQQRRRSEKKITRLVLMVVVVFVLCWMPF

SEQ ID NO: 39484 - protein, 47 aa, Artificial Sequence
  Quasi-synthetic sequence derived from human genome
RIARILAGSKKKICTKKPRFMSACAQLVIAFILICIQLGIIVALFIM

SEQ ID NO: 39485 - protein, 47 aa, Artificial Sequence
  Quasi-synthetic sequence derived from human genome
KWWRSFLGRKQYQLTVQVAYYTMMMNLYNAMAVRIQRRWRGYRVRKY

SEQ ID NO: 39486 - protein, 47 aa, Artificial Sequence
  Quasi-synthetic sequence derived from human genome
LRTLRAVRVLRPLKLVSGIPSLQIVLKSIMKAMVPLLQIGLLLFFAI

SEQ ID NO: 39487 - protein, 47 aa, Artificial Sequence
  Quasi-synthetic sequence derived from human genome
RLVALKKFVAVLAKYFPGRPLVQNFLHSVNEWLKRQKRNKIPYSFFK

SEQ ID NO: 39488 - protein, 47 aa, Artificial Sequence
  Quasi-synthetic sequence derived from human genome
WRQTRTLLLKNYLIKCRTKKSSVQEILFPLFFLFWLILISMMHPNKK

SEQ ID NO: 39489 - protein, 47 aa, Artificial Sequence
  Quasi-synthetic sequence derived from human genome
RKLCAHYQQSGKHNKKLKKSIKIIFIVVAAFLVSWLPFNTFKFLAIV

SEQ ID NO: 39490 - protein, 47 aa, Artificial Sequence
  Quasi-synthetic sequence derived from human genome
KVARSLALALLCLVLSTCVGPYLFPYFIPLNGDRLLRNKKRKARWLR

SEQ ID NO: 39491 - protein, 47 aa, Artificial Sequence
  Quasi-synthetic sequence derived from human genome
FRLLRVLKLVRFMPALRRQLVVLMKTMDNVATFCMLLMLFIFIFSIL

SEQ ID NO: 39492 - protein, 47 aa, Artificial Sequence
  Quasi-synthetic sequence derived from human genome
RMRRYRMTHSEKKRLKQCNVITRLRGLQVPVGLPFLLILLGLYLMPL

SEQ ID NO: 39493 - protein, 47 aa, Artificial Sequence
  Quasi-synthetic sequence derived from human genome
FYLLASVLLSLLLILKAGRRWNKYFKSRRPLFTGGLIGGLFTYVLFW

SEQ ID NO: 39494 - protein, 47 aa, Artificial Sequence
  Quasi-synthetic sequence derived from human genome
SKLSRRWRRWNRFNRRRCRAAVKSVTFYWLVIVLVFLNTLTISSEHY

SEQ ID NO: 39495 - protein, 47 aa, Artificial Sequence
  Quasi-synthetic sequence derived from human genome
RKYKKNIKALYIVHPTMFIKTLLILFKPLISFKFGQKIFYVNYLSEL

SEQ ID NO: 39496 - protein, 47 aa, Artificial Sequence
  Quasi-synthetic sequence derived from human genome
RFRRSRSPMHYMYRPRSRSPRICHRFISRYRSRSRSRSPYRIRNPFR

SEQ ID NO: 39497 - protein, 47 aa, Artificial Sequence
  Quasi-synthetic sequence derived from human genome
LVKRARLVRVHAYIISYLKKEMPSVFGKENKKKQLILKLPVIFAKIQ

SEQ ID NO: 39498 - protein, 47 aa, Artificial Sequence
  Quasi-synthetic sequence derived from human genome
HLLKIKNTFCLWKRLIKLKDNHCEQLRVKIRKLKNKASVLQKRISEK

SEQ ID NO: 39499 - protein, 47 aa, Artificial Sequence
  Quasi-synthetic sequence derived from human genome
FVALLWKRLLIARRSRKGFFAQIVLPAVFVCIALVFSLIVPPFGKYP

SEQ ID NO: 39500 - protein, 47 aa, Artificial Sequence
  Quasi-synthetic sequence derived from human genome
RRKKKSRMTFFVTQLAITEKQARVLIVIAWSLSFLFSIPTLIIFGKR

SEQ ID NO: 39501 - protein, 47 aa, Artificial Sequence
  Quasi-synthetic sequence derived from human genome
AWAAIIIQKHCRGYLVRSLYQLIRMATITMQAYSRGFLARRRYRKML

SEQ ID NO: 39502 - protein, 47 aa, Artificial Sequence
  Quasi-synthetic sequence derived from human genome
LLLLSIVILYCRIYSLVRTRSRRLTFRKNISKASRSSEKSLALLKTV

SEQ ID NO: 39503 - protein, 47 aa, Artificial Sequence
  Quasi-synthetic sequence derived from human genome
FCLFTWDKWLKVYKSIYFLGHIFFLSLLFILPYIHKAMVPRKEKLKK

SEQ ID NO: 39504 - protein, 47 aa, Artificial Sequence
  Quasi-synthetic sequence derived from human genome
RRAKRKVTRMILIVAALFCLCWMPHHALILCVWFGQFPLTRATYALR

SEQ ID NO: 39505 - protein, 47 aa, Artificial Sequence
  Quasi-synthetic sequence derived from human genome
ALLLLPLLLLLPLLLLKLHLWPQLRWLPADLAFAVRALCCKRALRAR

SEQ ID NO: 39506 - protein, 47 aa, Artificial Sequence
  Quasi-synthetic sequence derived from human genome
KLKKITKTVQQRYWAMKERNIQFQRYNKLRHSVIYIQAIFRGKKARR

SEQ ID NO: 39507 - protein, 47 aa, Artificial Sequence
  Quasi-synthetic sequence derived from human genome
LLVVVNALLRKRRYHAALAVLKGFRNGAVYGAKIRAPHALVMTFLFR

SEQ ID NO: 39508 - protein, 47 aa, Artificial Sequence
  Quasi-synthetic sequence derived from human genome
LLPVPGAKKSAKLYIPYIILTIIILTIVGFIWLLKVNGCRKYKLNKT

SEQ ID NO: 39509 - protein, 47 aa, Artificial Sequence
  Quasi-synthetic sequence derived from human genome
IYFIHSLCLLGRLLIYKQGRKLFPIKLKNKKGLVSLIDLLVLFTQLI

SEQ ID NO: 39510 - protein, 47 aa, Artificial Sequence
  Quasi-synthetic sequence derived from human genome
KAVRHFLLRKKQEKFTSGIIKIQALWRGYSWRKKNDCTKIKAIRLSL

SEQ ID NO: 39511 - protein, 47 aa, Artificial Sequence
  Quasi-synthetic sequence derived from human genome
SKRRKSNPKPLVLSEARKQLMIYRLPQVLRLHLKRFRWSGRNHREKI

SEQ ID NO: 39512 - protein, 47 aa, Artificial Sequence
  Quasi-synthetic sequence derived from human genome
KKKMSKLSRSARAGVIFPVGRLMRYLKKGTFKYRISVGAPVYMAAVI

SEQ ID NO: 39513 - protein, 47 aa, Artificial Sequence
  Quasi-synthetic sequence derived from human genome
RISITFFRLFRVMRLVKLLSRGEGIRTLLWTFIKSFQALPYVALLIV

SEQ ID NO: 39514 - protein, 47 aa, Artificial Sequence
  Quasi-synthetic sequence derived from human genome
KKKPVPVLLGSLLKRKMLPRAALLVTTRPRALRDLQLLAQQPIYVRV

SEQ ID NO: 39515 - protein, 47 aa, Artificial Sequence
  Quasi-synthetic sequence derived from human genome
PRLLPRNTFSRKAFKLKKPSKYCSWKCAALSAIAAALLLAILLAYFI

SEQ ID NO: 39516 - protein, 47 aa, Artificial Sequence
  Quasi-synthetic sequence derived from human genome
CHGVLKRPARLPCSHIFCKKCILRWLARQKTCPCCRKEVKRKKVVHM

SEQ ID NO: 39517 - protein, 47 aa, Artificial Sequence
  Quasi-synthetic sequence derived from human genome
PRGKFKVIALTVLASVRIYYQYRRVKPVTREIVIRDPYALRPLRRLI

SEQ ID NO: 39518 - protein, 47 aa, Artificial Sequence
  Quasi-synthetic sequence derived from human genome
FFRLFRVMRLIKLLSRAEGVRTLLWTFIKSFQALPYVALLIVMLFFI

SEQ ID NO: 39519 - protein, 47 aa, Artificial Sequence
  Quasi-synthetic sequence derived from human genome
MAKPFFRLQKFLRRTQFLLFFLTAAYLMTGSLLLLQRVRVALPQGPR

SEQ ID NO: 39520 - protein, 47 aa, Artificial Sequence
  Quasi-synthetic sequence derived from human genome
RKYKKNLKALYVVHPTSFIKVLWNILKPLISHKFGKKVIYFNYLSEL

SEQ ID NO: 39521 - protein, 47 aa, Artificial Sequence
  Quasi-synthetic sequence derived from human genome
CLAVLGRALPTSRLDLACSLSWNVIRYSLQKLRLVRWLLKKVFQCRR

SEQ ID NO: 39522 - protein, 47 aa, Artificial Sequence
  Quasi-synthetic sequence derived from human genome
SRICSSAPLLYFLFICPFVLLLLLLISLLCLYWKARKLSTLRSNTRK

SEQ ID NO: 39523 - protein, 47 aa, Artificial Sequence
  Quasi-synthetic sequence derived from human genome
WRNNFWIILAVAIIVVSVGLGLILYCVCKWQLRRGKKWEIAKPLKHK

SEQ ID NO: 39524 - protein, 47 aa, Artificial Sequence
  Quasi-synthetic sequence derived from human genome
GRLRGVRAVRPKVLMRLSKTKKHVSRAYGGSMCAKCVRDRIKRAFLI

SEQ ID NO: 39525 - protein, 47 aa, Artificial Sequence
  Quasi-synthetic sequence derived from human genome
THLLRLLRLIILLRIFHLFHQKRQLEKLIRRRVSENKRRYTRDGFDL

SEQ ID NO: 39526 - protein, 47 aa, Artificial Sequence
  Quasi-synthetic sequence derived from human genome
LIIRSLRQGLRVEKRLKTKAVRMIAIVLAIFLVCFVPYHVNRSVYVL

SEQ ID NO: 39527 - protein, 47 aa, Artificial Sequence
  Quasi-synthetic sequence derived from human genome
WRGYRQRKIYLEWLQYFKANLDAIIKIQAWARMWAARRQYLRRLHYF

SEQ ID NO: 39528 - protein, 47 aa, Artificial Sequence
  Quasi-synthetic sequence derived from human genome
MNRLRNAKIYVERAVKQKKIFTIQGCYPVIRCLLRRRGWVEKKMVHR

SEQ ID NO: 39529 - protein, 47 aa, Artificial Sequence
  Quasi-synthetic sequence derived from human genome
SRRNVNQTRLKRVLSGATLPDKLRDKLKLMKQRRKPPGFLALVKLLR

SEQ ID NO: 39530 - protein, 47 aa, Artificial Sequence
  Quasi-synthetic sequence derived from human genome
LVSIPWKVLKVVAKVIRALLRILCCLLKAICRVLSIPVRVLVDVATF

SEQ ID NO: 39531 - protein, 47 aa, Artificial Sequence
  Quasi-synthetic sequence derived from human genome
KLLAKRRRMVLEFYVQQEWAAVRLQSWVRMWCVRQRYCRLLNAVRII

SEQ ID NO: 39532 - protein, 47 aa, Artificial Sequence
  Quasi-synthetic sequence derived from human genome
VVILSIVGTVLSDIIQKYFFSPTLFRVIRLARIGRILRLIRGAKGIR

SEQ ID NO: 39533 - protein, 47 aa, Artificial Sequence
  Quasi-synthetic sequence derived from human genome
FFRGLLYWKNTLALAAILVLLRVRQCLSLRPAPAMRVARPQPQRSLR

SEQ ID NO: 39534 - protein, 47 aa, Artificial Sequence
  Quasi-synthetic sequence derived from human genome
FALRYNILTLMRMLSLKSLKKQMKKVKKMTVKDMVTAFFSSYWSIFM

SEQ ID NO: 39535 - protein, 47 aa, Artificial Sequence
  Quasi-synthetic sequence derived from human genome
YARNVKFPLPIYKSKKGWTAYKLQLFKMFPIILAILVSWLLCFIFTV

SEQ ID NO: 39536 - protein, 47 aa, Artificial Sequence
  Quasi-synthetic sequence derived from human genome
IGTYHTIFLLTILAALALLVLILLCLLIYYCRRRCLKPRQQHRKLQL

SEQ ID NO: 39537 - protein, 47 aa, Artificial Sequence
  Quasi-synthetic sequence derived from human genome
IIRIMRVLRIARVLKLLKMAVGMRALLDTVGNLGLLFMLLFFIFAAL

SEQ ID NO: 39538 - protein, 47 aa, Artificial Sequence
  Quasi-synthetic sequence derived from human genome
FFGFHRLLLKWRGSIYKLLYREFIVFAVLYTAISLVYRLLLTGVQKR

SEQ ID NO: 39539 - protein, 47 aa, Artificial Sequence
  Quasi-synthetic sequence derived from human genome
SAHPRMGVGCRLSRALLTAVTNVLIFFWCLAFLWGLLILLKYRWRKL

SEQ ID NO: 39540 - protein, 47 aa, Artificial Sequence
  Quasi-synthetic sequence derived from human genome
FFVAAFHLLFDFLAFKNDISFWKKKKSMIGMSTKLWKVKKALKMTIF

SEQ ID NO: 39541 - protein, 47 aa, Artificial Sequence
  Quasi-synthetic sequence derived from human genome
KGWIRCNTTIRKSGFGGITMLFTGYFVLCCSWSFRRLKKLCRPLPWK

SEQ ID NO: 39542 - protein, 47 aa, Artificial Sequence
  Quasi-synthetic sequence derived from human genome
LRCIRLLRIFKITKYWTSLSNLVASLLNSIRSIASLLLLLFLFIVIF

SEQ ID NO: 39543 - protein, 47 aa, Artificial Sequence
  Quasi-synthetic sequence derived from human genome
FRTHHTGLLSVLAMFFLLVLILSSVFLFRLFKRRQGRIFPEGKMWKL

SEQ ID NO: 39544 - protein, 47 aa, Artificial Sequence
  Quasi-synthetic sequence derived from human genome
RAQVPPLSWIRQCYRTLDRRLRKNLRALVVVHATWYVKAFLALLRPF

SEQ ID NO: 39545 - protein, 47 aa, Artificial Sequence
  Quasi-synthetic sequence derived from human genome
VFWRRLLGLLPGRPGLAALLGRLSDRLGRNRDRQRRRSPWLLLAPLL

SEQ ID NO: 39546 - protein, 47 aa, Artificial Sequence
  Quasi-synthetic sequence derived from human genome
QLQLLLWKNVTLKRRSPWVLAFEIFIPLVLFFILLGLRQKKPTISVK

SEQ ID NO: 39547 - protein, 47 aa, Artificial Sequence
  Quasi-synthetic sequence derived from human genome
LPIQLFPKSFFSSKAKVIYLMRNPRDVLVSGYFFWKNMKFIKKPKSW

SEQ ID NO: 39548 - protein, 47 aa, Artificial Sequence
  Quasi-synthetic sequence derived from human genome
FRNPVIERIPRLRRQKKIFSKQQGKAFQRARQMNIDVATWVRLLRRL

SEQ ID NO: 39549 - protein, 47 aa, Artificial Sequence
  Quasi-synthetic sequence derived from human genome
KLMGPAGYLTWNYVLNEAIRLSLIMQLVALLLVVLWIRWKCRRLRIR

SEQ ID NO: 39550 - protein, 47 aa, Artificial Sequence
  Quasi-synthetic sequence derived from human genome
KCALVRHKFNRLPRVLILHLKRYSFNVALSLNNKIGQQVIIPRYLTL

SEQ ID NO: 39551 - protein, 47 aa, Artificial Sequence
  Quasi-synthetic sequence derived from human genome
FILNLFSFLLRIKTSLLHEEVSLVEKKLFEKKYSVKRKKSRSKKVRR

SEQ ID NO: 39552 - protein, 47 aa, Artificial Sequence
  Quasi-synthetic sequence derived from human genome
RLFCVFYGLFGVPLCLTWISALGKFFGGRAKRLGQFLTKRGVSLRKA

SEQ ID NO: 39553 - protein, 47 aa, Artificial Sequence
  Quasi-synthetic sequence derived from human genome
RRSRWPFSKARSFCKTHASLFKKILLGLLCLAYAAYLLAACILNFQR

SEQ ID NO: 39554 - protein, 47 aa, Artificial Sequence
  Quasi-synthetic sequence derived from human genome
MKTSKPIVHSRKKYRFHKTRSRMTHRTPKVKKSPKVRKKSYLSRLML

SEQ ID NO: 39555 - protein, 47 aa, Artificial Sequence
  Quasi-synthetic sequence derived from human genome
YLAILKAVKIIQGCFYTKLERTRFLNVRASAIIIQRKWRAILPAKIA

SEQ ID NO: 39556 - protein, 47 aa, Artificial Sequence
  Quasi-synthetic sequence derived from human genome
VRQAHGSWFRLSFVYNHYLFFACILVVLLAIFLYLLRLRRIHHRQTR

SEQ ID NO: 39557 - protein, 47 aa, Artificial Sequence
  Quasi-synthetic sequence derived from human genome
ILLRWARLLGFATVYGTVTLKLHRVLKVFLSRTAQRIPYMTGGRVMR

SEQ ID NO: 39558 - protein, 47 aa, Artificial Sequence
  Quasi-synthetic sequence derived from human genome
RIGRILRLVRAARGIRTLLFALMMSLPSLFNIGLLLFLIMFIYAILG

SEQ ID NO: 39559 - protein, 47 aa, Artificial Sequence
  Quasi-synthetic sequence derived from human genome
MCCALFLLILLTGVLCHRFHGLWYMKMMWAWLQAKRKPRKAPSRNIC

SEQ ID NO: 39560 - protein, 47 aa, Artificial Sequence
  Quasi-synthetic sequence derived from human genome
VVWAIFRPGTSFGISVLRALRLLRIFKITKYWASLRNLVVSLMSSMK

SEQ ID NO: 39561 - protein, 47 aa, Artificial Sequence
  Quasi-synthetic sequence derived from human genome
LLMKKSQIVIAAWYRRYAQQKRYQQTKSSALVIQSYIRGWKARKILR

SEQ ID NO: 39562 - protein, 47 aa, Artificial Sequence
  Quasi-synthetic sequence derived from human genome
LRHVPLRRIHLFTLVQILCLAVLWILKSTVAAIIFPVMILGLIIVRR

SEQ ID NO: 39563 - protein, 47 aa, Artificial Sequence
  Quasi-synthetic sequence derived from human genome
RSLKHLCRLKIRKCMGRLHLRCPVFMSFLPLPNRLKAYVLYKEYDLY

SEQ ID NO: 39564 - protein, 47 aa, Artificial Sequence
  Quasi-synthetic sequence derived from human genome
AKAKALKAKKAVLKGVHSHKKKKIRTSPTFRRPKTLRLRRQPKYPRK

SEQ ID NO: 39565 - protein, 47 aa, Artificial Sequence
  Quasi-synthetic sequence derived from human genome
VVRKSIARVLTVINQTQKENLRKFYKGKKYKPLDLRPKKTRAMRRRL

SEQ ID NO: 39566 - protein, 47 aa, Artificial Sequence
  Quasi-synthetic sequence derived from human genome
LLMSLFLFFFVLFLCLFFYNCYKGYLPRQCLKFRSALLIGKKKPKSD

SEQ ID NO: 39567 - protein, 47 aa, Artificial Sequence
  Quasi-synthetic sequence derived from human genome
RRRKKKERRPRGTMQAINNERKASKVLGIVFFVFLIMWCPFFITNIL

SEQ ID NO: 39568 - protein, 47 aa, Artificial Sequence
  Quasi-synthetic sequence derived from human genome
LLLILRGQTRHQVRKGVAVRARPWRKNLQEVFGKRWLLGLLVPMFNV

SEQ ID NO: 39569 - protein, 47 aa, Artificial Sequence
  Quasi-synthetic sequence derived from human genome
MANSRFSCTQIWVKMYGYFAGLCRRLQKFWRVTVKGFFVKKKEKKIP

SEQ ID NO: 39570 - protein, 47 aa, Artificial Sequence
  Quasi-synthetic sequence derived from human genome
RKRKCDLRAVRVGLLLGGGGVYGSRFRFTFPGCRALSPWRVRVQRRR

SEQ ID NO: 39571 - protein, 47 aa, Artificial Sequence
  Quasi-synthetic sequence derived from human genome
PIYPGHGMMFVRNDCKVFRFCKSKCHKNFKKKRNPRKVRWTKAFRKA

SEQ ID NO: 39572 - protein, 47 aa, Artificial Sequence
  Quasi-synthetic sequence derived from human genome
IFQGCLYLIYNLLQAVFFVLFVLSVHYLWKKWKKHQKKLKKQASLEK

SEQ ID NO: 39573 - protein, 47 aa, Artificial Sequence
  Quasi-synthetic sequence derived from human genome
KRDVKVSLFTAFFLATIMGVRFKRSKKIMPAGLVAGLSLMMILRLVL

SEQ ID NO: 39574 - protein, 47 aa, Artificial Sequence
  Quasi-synthetic sequence derived from human genome
RSFALLLPVYALGYLGLSFSWVLLALALLAWCRRSRGLKALRLCRAL

SEQ ID NO: 39575 - protein, 47 aa, Artificial Sequence
  Quasi-synthetic sequence derived from human genome
KEAVLLLKKLKAWNDIKKVYASQRMRAGKGKMRNRRRIQRRGPCIIY

SEQ ID NO: 39576 - protein, 47 aa, Artificial Sequence
  Quasi-synthetic sequence derived from human genome
MAICYTGIIKTLLRCPSKKKYKAIRLIFVIMAVFFIFWTPYNVAILL

SEQ ID NO: 39577 - protein, 47 aa, Artificial Sequence
  Quasi-synthetic sequence derived from human genome
LKPVQKLFAIIVGRGIRKWWQALPPNKKEVVKENIRKNKWKLFLGLS

SEQ ID NO: 39578 - protein, 47 aa, Artificial Sequence
  Quasi-synthetic sequence derived from human genome
SHKTFTIKRFLAKKQKQNRPIPQWIQMKPGSKIRYNSKRRHWRRTKL

SEQ ID NO: 39579 - protein, 47 aa, Artificial Sequence
  Quasi-synthetic sequence derived from human genome
IFLYLKWRVKKVVLVLLLVTSVFLFLNIALINIHINASINGYRRNKT

SEQ ID NO: 39580 - protein, 47 aa, Artificial Sequence
  Quasi-synthetic sequence derived from human genome
WRMLLRILPQSFGFIVPLLIMLFCYGFTLRTLFKAHMGQKHRAMRVI

SEQ ID NO: 39581 - protein, 47 aa, Artificial Sequence
  Quasi-synthetic sequence derived from human genome
LRCVRLLRIFKITRYWNSLSNLVASLLNSVRSIASLLLLLFLFIIIF

SEQ ID NO: 39582 - protein, 47 aa, Artificial Sequence
  Quasi-synthetic sequence derived from human genome
LWLRDTYKLWVPQPPPRTIKRTRRRLSRNRDPGRLILSTIRLRPRQV

SEQ ID NO: 39583 - protein, 47 aa, Artificial Sequence
  Quasi-synthetic sequence derived from human genome
VVRRRSFSISPVRLRRSRTPLRRRFSRSPIRRKRSRSSERGRSPKRL

SEQ ID NO: 39584 - protein, 47 aa, Artificial Sequence
  Quasi-synthetic sequence derived from human genome
MRKRKISVCQQTWALLCKNFLKKWRMKRESLMEWLNSLLLLLCLYIY

SEQ ID NO: 39585 - protein, 47 aa, Artificial Sequence
  Quasi-synthetic sequence derived from human genome
VPVTLWHLGYWLCYVNSTVNPICYALCNRTFRKTFKMLLLCRWKKKK

SEQ ID NO: 39586 - protein, 47 aa, Artificial Sequence
  Quasi-synthetic sequence derived from human genome
IIVIFCYLRIWILVLQVRQRVKPDRKPKLKPQDFRNFVTMFVVFVLF

SEQ ID NO: 39587 - protein, 47 aa, Artificial Sequence
  Quasi-synthetic sequence derived from human genome
NFRGHALPGTFFFIIGLWWCTKSILKYICKKQKRTCYLGSKTLFYRL

SEQ ID NO: 39588 - protein, 47 aa, Artificial Sequence
  Quasi-synthetic sequence derived from human genome
GKRFGCLCGKRFAVKPKRDRHIMLTFSLRPFGCGICNKRFKLKHHLT

SEQ ID NO: 39589 - protein, 47 aa, Artificial Sequence
  Quasi-synthetic sequence derived from human genome
LTRPFSGRRLPVRAWADVRRESRLLQLLGRLPLFGLGRLVTRKSWLW

SEQ ID NO: 39590 - protein, 47 aa, Artificial Sequence
  Quasi-synthetic sequence derived from human genome
LKIKLAVRMDKPQNMKHSGYLWAIGKNVWKRWKKRFFVLVQVSQYTF

SEQ ID NO: 39591 - protein, 47 aa, Artificial Sequence
  Quasi-synthetic sequence derived from human genome
FIMAMAVLDFLLMQTHSFAIYHQSLFRILKVFKSLRALRAIRVLRRL

SEQ ID NO: 39592 - protein, 47 aa, Artificial Sequence
  Quasi-synthetic sequence derived from human genome
RISITFFRLFRVMRLVKLLSRGEGIRTLLWTFIKSFQALPYVALLIA

SEQ ID NO: 39593 - protein, 47 aa, Artificial Sequence
  Quasi-synthetic sequence derived from human genome
FLMRVEFRKMMERRESIFCIQYNIRAFMNVKHWPWMKLYFKIKPLLK

SEQ ID NO: 39594 - protein, 47 aa, Artificial Sequence
  Quasi-synthetic sequence derived from human genome
RFTKITQYLIRIRKLTLKRQRKLVPLSKKVERREKRREEKALIAAQL

SEQ ID NO: 39595 - protein, 47 aa, Artificial Sequence
  Quasi-synthetic sequence derived from human genome
RGYLARQHFKKRKIQDLAIRCVQKNIKKNKGVKDWPWWKLFTTVRPL

SEQ ID NO: 39596 - protein, 47 aa, Artificial Sequence
  Quasi-synthetic sequence derived from human genome
IRAIRNFHTSPRFQAAPVPLLLMILKPVQKLFAIIVGRGIRKWWQAL

SEQ ID NO: 39597 - protein, 47 aa, Artificial Sequence
  Quasi-synthetic sequence derived from human genome
RIQATYKRCLGRREYVKKRQAAIKLEAHWRGALARKAIQRRKWAVRI

SEQ ID NO: 39598 - protein, 47 aa, Artificial Sequence
  Quasi-synthetic sequence derived from human genome
RLTFFFLIPLFIMIGCYLVIIHNLLHGRTSKLKPKVKEKSIRIIITL

SEQ ID NO: 39599 - protein, 47 aa, Artificial Sequence
  Quasi-synthetic sequence derived from human genome
SKCKTHCLATKKLDLWRLPPFLIIHLKRFQFVNDQWIKSQKIVRFLR

SEQ ID NO: 39600 - protein, 47 aa, Artificial Sequence
  Quasi-synthetic sequence derived from human genome
RWARPFYLAFVFCLALGLLQAIKLYLRRQRLLRDLRPFPAPPTHWFL

SEQ ID NO: 39601 - protein, 47 aa, Artificial Sequence
  Quasi-synthetic sequence derived from human genome
RARVSYRLLGVISLLHLVLSMGLQLYGFRQRQRARKEWRLHRGLSHR

SEQ ID NO: 39602 - protein, 47 aa, Artificial Sequence
  Quasi-synthetic sequence derived from human genome
KILGMLRVLRLLRTLRPLRVISRAQGLKLVVETLMSSLKPIGNIVVI

SEQ ID NO: 39603 - protein, 47 aa, Artificial Sequence
  Quasi-synthetic sequence derived from human genome
FRAARLIKLLRQGYTIRILLWTFVQSFKALPYVCLLIAMLFFIYAII

SEQ ID NO: 39604 - protein, 47 aa, Artificial Sequence
  Quasi-synthetic sequence derived from human genome
IKTLLRCPSKKKYKAIRLIFVIMAVFFIFWTPYNVAILLSSYQSILF

SEQ ID NO: 39605 - protein, 47 aa, Artificial Sequence
  Quasi-synthetic sequence derived from human genome
IMYKVPLIRKKSLRRTLSERGLLKDFLKKHNLNPARKYFPQWKAPTL

SEQ ID NO: 39606 - protein, 47 aa, Artificial Sequence
  Quasi-synthetic sequence derived from human genome
PGLLPQPVLAGVVGGVCFLGVAVLVSILAGCLLNRRRAARRRRKRLR

SEQ ID NO: 39607 - protein, 47 aa, Artificial Sequence
  Quasi-synthetic sequence derived from human genome
RVFSLFSYVLIYLFSKYLAFNTLFALKRMALQRDRKEKTRAWCIFIK

SEQ ID NO: 39608 - protein, 47 aa, Artificial Sequence
  Quasi-synthetic sequence derived from human genome
LAFKSYKPEIQNKLLIIKKKAKHKKHKSGKKSVSKKAITKKRKTVIK

SEQ ID NO: 39609 - protein, 47 aa, Artificial Sequence
  Quasi-synthetic sequence derived from human genome
CRRLRAIYTIMRWFRRHKVRAHLAELQRRFQAARQPPLYGRDLVWPL

SEQ ID NO: 39610 - protein, 47 aa, Artificial Sequence
  Quasi-synthetic sequence derived from human genome
RLSKKLRRKLQMWLWSQTFCPVLYAWNDLGSRFWPRYVKVGSCFSKR

SEQ ID NO: 39611 - protein, 47 aa, Artificial Sequence
  Quasi-synthetic sequence derived from human genome
QKSLVYGLVGAGVVLMLIILVALLMLVFRSKREVKRQKYRLSQLYKW

SEQ ID NO: 39612 - protein, 47 aa, Artificial Sequence
  Quasi-synthetic sequence derived from human genome
IRSRFISHSSSSSWGMARGSIFKAIAHFKRTTFLKKHRMLGRLKYKV

SEQ ID NO: 39613 - protein, 47 aa, Artificial Sequence
  Quasi-synthetic sequence derived from human genome
KHKKKVNKGSTAARTFYLIKDIRFLLHEPIVNKFREYKVFVRKLRKA

SEQ ID NO: 39614 - protein, 47 aa, Artificial Sequence
  Quasi-synthetic sequence derived from human genome
KVQRIFTRRSKKLAVVHFFDHASAALARKKGKSLHKDMAIFWHRKKI

SEQ ID NO: 39615 - protein, 47 aa, Artificial Sequence
  Quasi-synthetic sequence derived from human genome
RLSLKLLRAFMWSLVFSVALVAAAVYGCIALTHVLCRPRRGCCGRRR

SEQ ID NO: 39616 - protein, 47 aa, Artificial Sequence
  Quasi-synthetic sequence derived from human genome
VRGMTKLDRTAFKKTVNIPVLKVRKEIVSKLMRSLKRAALQRPGIRR

SEQ ID NO: 39617 - protein, 47 aa, Artificial Sequence
  Quasi-synthetic sequence derived from human genome
AGPLRRGRPKRRRKPQPHSGSVLALPLRSRKIRKQLRSVVSRMAALR

SEQ ID NO: 39618 - protein, 47 aa, Artificial Sequence
  Quasi-synthetic sequence derived from human genome
RCWRAHKEYLAILKAVKIIQGCFYTKLERTRFLNVRASAIIIQRKWR

SEQ ID NO: 39619 - protein, 47 aa, Artificial Sequence
  Quasi-synthetic sequence derived from human genome
VVKILRVLRVLRPLRAINRAKGLKHVVQCMFVAISTIGNIVLVTTLL

SEQ ID NO: 39620 - protein, 47 aa, Artificial Sequence
  Quasi-synthetic sequence derived from human genome
VVLLLLLLFYVVRYCWLRRQAALQRRLSAMEKGKLHKPGKDASKRGR

SEQ ID NO: 39621 - protein, 47 aa, Artificial Sequence
  Quasi-synthetic sequence derived from human genome
RLRVKAVTKIREFILQKIYSFRKPMTNYQIPQTALLKYRFFYQFLLG

SEQ ID NO: 39622 - protein, 47 aa, Artificial Sequence
  Quasi-synthetic sequence derived from human genome
RWLVGFVLYTFLMGFLLPVGAICLCYVLIIAKMRMVALKAGWQQRKR

SEQ ID NO: 39623 - protein, 47 aa, Artificial Sequence
  Quasi-synthetic sequence derived from human genome
IVTANPWNTIALLCGAFLALFKAAEFAKLSIKWMIKIRKRYLKRRGQ

SEQ ID NO: 39624 - protein, 47 aa, Artificial Sequence
  Quasi-synthetic sequence derived from human genome
LLVYIKIYIVLRRRRKRVNTKRSSRAFRAHLRAPLKGNCTHPEDMKL

SEQ ID NO: 39625 - protein, 47 aa, Artificial Sequence
  Quasi-synthetic sequence derived from human genome
YLIKKTWMFGLPFCKFVSAMLHIHMYLTFLFYVVILVTRYLIFFKCK

SEQ ID NO: 39626 - protein, 47 aa, Artificial Sequence
  Quasi-synthetic sequence derived from human genome
HMGVLVLRGNTKINTFNWAKIRKLSFKRKHFLIKLHANILVLCKDTL

SEQ ID NO: 39627 - protein, 47 aa, Artificial Sequence
  Quasi-synthetic sequence derived from human genome
KRRQARRTAVIVQQKLRSSLLTKKQDQAARKIMRFLRRCRHRVKELK

SEQ ID NO: 39628 - protein, 47 aa, Artificial Sequence
  Quasi-synthetic sequence derived from human genome
IKGGHARSKNWRLSVRCGGWPLRWLMENGFLPDPPRIRYRKKKRILK

SEQ ID NO: 39629 - protein, 47 aa, Artificial Sequence
  Quasi-synthetic sequence derived from human genome
LGWSWLRRRRARGIPPGPTPWPLVGNFGHVLLPPFLRRRSWLSSRTR

SEQ ID NO: 39630 - protein, 47 aa, Artificial Sequence
  Quasi-synthetic sequence derived from human genome
KKLRPHLAKVLVYELLLGKGFRGGGGRWKALLGRHQARLKAELARLK

SEQ ID NO: 39631 - protein, 47 aa, Artificial Sequence
  Quasi-synthetic sequence derived from human genome
IFMVKIFMLLVVGITSGMWIWTSKTLQSWQQVCSRRLKKKSRRKPAS

SEQ ID NO: 39632 - protein, 47 aa, Artificial Sequence
  Quasi-synthetic sequence derived from human genome
FLVPVLIITACYLTIVCKLQRNRLAKTKKPFKIIVTIIITFFLCWCP

SEQ ID NO: 39633 - protein, 47 aa, Artificial Sequence
  Quasi-synthetic sequence derived from human genome
YVKIRSRKLGIFRRCWLVFKKASSKGPRRLEKFPDEKAAYFRNFHKV

SEQ ID NO: 39634 - protein, 47 aa, Artificial Sequence
  Quasi-synthetic sequence derived from human genome
RKFASIARNQVRKKRQMAARERKVTRTIFAILLAFILTWTPYNVMVL

SEQ ID NO: 39635 - protein, 47 aa, Artificial Sequence
  Quasi-synthetic sequence derived from human genome
RAHRAYLTLLFATSIAGPGLLIGLLYARLARAYRRSQRASFKRARRP

SEQ ID NO: 39636 - protein, 47 aa, Artificial Sequence
  Quasi-synthetic sequence derived from human genome
MRRTRRPRFVLMNKMDDLNLHYRFLNWRRRIREIREVRAFRYQERFK

SEQ ID NO: 39637 - protein, 47 aa, Artificial Sequence
  Quasi-synthetic sequence derived from human genome
LFIWLKMRISKLVPWMILGSLLYVSMICVFHSKYAGFMVPYFLRKFF

SEQ ID NO: 39638 - protein, 47 aa, Artificial Sequence
  Quasi-synthetic sequence derived from human genome
MFLAELIEKYFVSPTLFRVIRLARIGRILRLIKGAKGIRTLLFALMM

SEQ ID NO: 39639 - protein, 47 aa, Artificial Sequence
  Quasi-synthetic sequence derived from human genome
SWLRVRFGTWNWIWRRCCRAASAAVLAPLGFTLRKPPAVGRNRRHHR

SEQ ID NO: 39640 - protein, 47 aa, Artificial Sequence
  Quasi-synthetic sequence derived from human genome
IYTFILGFLVPLTIICLCYLFIIIKVKSSGIRVGSSKRKKSEKKVTR

SEQ ID NO: 39641 - protein, 47 aa, Artificial Sequence
  Quasi-synthetic sequence derived from human genome
LRTFRLMRVLKLVRFLPALQRQLVVLMKTMDNVATFCMLLMLFIFIF

SEQ ID NO: 39642 - protein, 47 aa, Artificial Sequence
  Quasi-synthetic sequence derived from human genome
ITKLIRRRPFRQIQVLEPLNLLITISGHKNRLRVYHLTWLRNKILNN

SEQ ID NO: 39643 - protein, 47 aa, Artificial Sequence
  Quasi-synthetic sequence derived from human genome
KPGQLINWFICSLCVPRVRKLWSSRRPRTRRNLLLGTACAIYLGFLV

SEQ ID NO: 39644 - protein, 47 aa, Artificial Sequence
  Quasi-synthetic sequence derived from human genome
FKMNILGLLIPFTIFMFCYIKILHQLKRCQNHNKTKAIRLVLIVVIA

SEQ ID NO: 39645 - protein, 47 aa, Artificial Sequence
  Quasi-synthetic sequence derived from human genome
ARLFFGPQHRPVILRLPNRRALRLRASFSQPLFQAVAAICRLLSIRH

SEQ ID NO: 39646 - protein, 47 aa, Artificial Sequence
  Quasi-synthetic sequence derived from human genome
MLYRFLARRTNSTFNQVVLKRLFMSRTNRPPLSLSRMIRKMKLPGRE

SEQ ID NO: 39647 - protein, 47 aa, Artificial Sequence
  Quasi-synthetic sequence derived from human genome
RLKSYMKFLFVREPFERLVSAYRNKFTQKYNISFHKRYGTKIIKRQR

SEQ ID NO: 39648 - protein, 47 aa, Artificial Sequence
  Quasi-synthetic sequence derived from human genome
ILLALGALLVLQLIRRRRREHGALWLPPGFTRRPRTQSAPHRRRPPL

SEQ ID NO: 39649 - protein, 47 aa, Artificial Sequence
  Quasi-synthetic sequence derived from human genome
CFIRHGRTAYLQLYATLLLLLIVSVLACNFSVILNLIRMHRRSRRSR

SEQ ID NO: 39650 - protein, 47 aa, Artificial Sequence
  Quasi-synthetic sequence derived from human genome
FMKICVFIFAFVIPVLIIIVCYTLMILRLKSVRLLSGSREKDRNLRR

SEQ ID NO: 39651 - protein, 47 aa, Artificial Sequence
  Quasi-synthetic sequence derived from human genome
RLIPATLYPGRVILSLDFILFCLRLMHIFTISKTLGPKIIIVKRMMK

SEQ ID NO: 39652 - protein, 47 aa, Artificial Sequence
  Quasi-synthetic sequence derived from human genome
FRLFRVMRLVKLLSRGEGIRTLLWTFIKSFQALPYVALLIVMLFFIY

SEQ ID NO: 39653 - protein, 47 aa, Artificial Sequence
  Quasi-synthetic sequence derived from human genome
RGKDPTRRELSLGRKKAPHRLCGRFSRISMKLPRIPLRRQKLPKVVV

SEQ ID NO: 39654 - protein, 47 aa, Artificial Sequence
  Quasi-synthetic sequence derived from human genome
LRCVRLLRIFKVTRHWASLSNLVASLLNSMKSIASLLLLLFLFIIIF

SEQ ID NO: 39655 - protein, 47 aa, Artificial Sequence
  Quasi-synthetic sequence derived from human genome
RQVALAVSKFLLAFLVPLAIIASSHAAVSLRLQHRGRRRPGRFVRLV

SEQ ID NO: 39656 - protein, 47 aa, Artificial Sequence
  Quasi-synthetic sequence derived from human genome
RAVYRVLKNCPSVALKKKAKCLLSKWKAVYKQTHSKARNSPKLFPVR

SEQ ID NO: 39657 - protein, 47 aa, Artificial Sequence
  Quasi-synthetic sequence derived from human genome
RLRFLFNELRPAVCNDLSIMSKFKLLSSLPHWRRIAQKIIREPRKKR

SEQ ID NO: 39658 - protein, 47 aa, Artificial Sequence
  Quasi-synthetic sequence derived from human genome
KIRKHYLHLRATVVSIQRRYRKLTAVRTQAVICIQSYYRGFKVRKDI

SEQ ID NO: 39659 - protein, 47 aa, Artificial Sequence
  Quasi-synthetic sequence derived from human genome
YARIIGAVLKIKTASGRKKAFSTCASHLAVVLIFFGSIIFMYVRLKK

SEQ ID NO: 39660 - protein, 47 aa, Artificial Sequence
  Quasi-synthetic sequence derived from human genome
YRTYRCAHPLATLFKILASFYISLVIFYGLICMYTLWWMLRRSLKKY

SEQ ID NO: 39661 - protein, 47 aa, Artificial Sequence
  Quasi-synthetic sequence derived from human genome
RLRLKKIFSGVFVKVTPQNLKMLRIVEPYVTWGFPNLKSVRELILKR

SEQ ID NO: 39662 - protein, 47 aa, Artificial Sequence
  Quasi-synthetic sequence derived from human genome
KATKRCKKLEAVYKEFELQKVCYLPLNTFLLKPIQRLLHYRLLLRRL

SEQ ID NO: 39663 - protein, 47 aa, Artificial Sequence
  Quasi-synthetic sequence derived from human genome
MFLADIIEKYFVSPTLFRVIRLARIGRILRLIKGAKGIRTLLFALMM

SEQ ID NO: 39664 - protein, 47 aa, Artificial Sequence
  Quasi-synthetic sequence derived from human genome
LGPSDLLVKLRLCFLVMAYGTTIFHPLLYAFTRQKFQKVLKSKMKKR

SEQ ID NO: 39665 - protein, 47 aa, Artificial Sequence
  Quasi-synthetic sequence derived from human genome
PVRRRRRRPGGRVPKDRPSLTVTPKRWKLRARPSLTVTPRRLGLRAR

SEQ ID NO: 39666 - protein, 47 aa, Artificial Sequence
  Quasi-synthetic sequence derived from human genome
CWTLALCWALLLWKMRLFQRQWANSFFQGLQQRMLQRSLRWWHLRAL

SEQ ID NO: 39667 - protein, 47 aa, Artificial Sequence
  Quasi-synthetic sequence derived from human genome
CIQSWWRGTLGRRKAAKRKWAAQTIRRLIRGFVLRHAPRCPENAFFL

SEQ ID NO: 39668 - protein, 47 aa, Artificial Sequence
  Quasi-synthetic sequence derived from human genome
MIKFASYYAGIAVAVLITGYIQICFWVIAAARQIQKMRKFYFRRIMR

SEQ ID NO: 39669 - protein, 47 aa, Artificial Sequence
  Quasi-synthetic sequence derived from human genome
IRKRLRCRRKTVLVLMCILTAYVLCWAPFYGFTIVRDFFPTVFVKEK

SEQ ID NO: 39670 - protein, 47 aa, Artificial Sequence
  Quasi-synthetic sequence derived from human genome
RIQRAYKLYLAVKNANKQVNSVICIQRWFRARLQEKRFIQKYHSIKK

SEQ ID NO: 39671 - protein, 47 aa, Artificial Sequence
  Quasi-synthetic sequence derived from human genome
KINLAVANTGILVFQGFTKINAFNWAKVRKLSFKRKRFLIKLRPDAN

SEQ ID NO: 39672 - protein, 47 aa, Artificial Sequence
  Quasi-synthetic sequence derived from human genome
FVVMRFSLAVLYQACCVALLLWLALLLSIQRRLPRERKIKYSKLLSM

SEQ ID NO: 39673 - protein, 47 aa, Artificial Sequence
  Quasi-synthetic sequence derived from human genome
KPQMNYDKLSRALRYYYNKRILHKTKGKRFTYKFNFNKLVLVNYPFI

SEQ ID NO: 39674 - protein, 47 aa, Artificial Sequence
  Quasi-synthetic sequence derived from human genome
KKLPGVMLFKKKKTRKLKIALALSDLVIYTKAEKFKSFQHSRLYQQF

SEQ ID NO: 39675 - protein, 47 aa, Artificial Sequence
  Quasi-synthetic sequence derived from human genome
KKSKVHYHVAVIINYLGHCISLVALLVAFVLFLRLRSIRCLRNIIHW

SEQ ID NO: 39676 - protein, 47 aa, Artificial Sequence
  Quasi-synthetic sequence derived from human genome
KLVSPKWKNFKGLKLQWRDKIRLNNAIWRAWYMQYLEKRKNPVCHFV

SEQ ID NO: 39677 - protein, 47 aa, Artificial Sequence
  Quasi-synthetic sequence derived from human genome
RVALARVSSVKLISKAKIRTVKMTFIIVLAFIVCWTPFFFVQMWSVW

SEQ ID NO: 39678 - protein, 47 aa, Artificial Sequence
  Quasi-synthetic sequence derived from human genome
KIVKSIVEKKPRTFIIKLIKWLMIAIPATFVNSAIRYLECKLALAFR

SEQ ID NO: 39679 - protein, 47 aa, Artificial Sequence
  Quasi-synthetic sequence derived from human genome
HTQHKGRLKHRGSSLHPFRKGLQEKDKVWLLREQKRKKKLRKLLKRL

SEQ ID NO: 39680 - protein, 47 aa, Artificial Sequence
  Quasi-synthetic sequence derived from human genome
SGLGRHLGVVIGILVAVILLLLLLLLLFLILRHRRQGKHWTSTQRKA

SEQ ID NO: 39681 - protein, 47 aa, Artificial Sequence
  Quasi-synthetic sequence derived from human genome
ITTYHTVFLLAILGGMAFILLVLLCLLLYYCRRKCLKPRQHHRKLQL

SEQ ID NO: 39682 - protein, 47 aa, Artificial Sequence
  Quasi-synthetic sequence derived from human genome
RHPRTGCKFKFFFQRNPYFRNKLIVKVYEVRSFGQVVSFSTLIMWRR

SEQ ID NO: 39683 - protein, 47 aa, Artificial Sequence
  Quasi-synthetic sequence derived from human genome
LCRKNQYQTRVIHDGARLFRIKCVTRIQAYWRGCVVRKWYRNLRKTV

SEQ ID NO: 39684 - protein, 47 aa, Artificial Sequence
  Quasi-synthetic sequence derived from human genome
PERRYIENIYHSKPMRWPFFLFIPFFIIFCVLIAIMVKVNFQRKKWR

SEQ ID NO: 39685 - protein, 47 aa, Artificial Sequence
  Quasi-synthetic sequence derived from human genome
FSITRPLTYRAKRTPKRAGIMIGLAWLISFILWAPAILCWQYLVGKR

SEQ ID NO: 39686 - protein, 47 aa, Artificial Sequence
  Quasi-synthetic sequence derived from human genome
LKRIRKIKNVTNQIALLKLGKLPLLYKVGPVNVIQWFGQYFALFCWN

SEQ ID NO: 39687 - protein, 47 aa, Artificial Sequence
  Quasi-synthetic sequence derived from human genome
KAPKVVRKADRSRTSILIICILITGLGIISVISHLTKRRRSQRNRRV

SEQ ID NO: 39688 - protein, 47 aa, Artificial Sequence
  Quasi-synthetic sequence derived from human genome
VSRGRLRRLLWIGFTLTAVALILWQCALLVFSFYTVSVSIKVHFRKL

SEQ ID NO: 39689 - protein, 47 aa, Artificial Sequence
  Quasi-synthetic sequence derived from human genome
LFYVSSTINPILYNLVSANFRHIFLATLACLCPVWRRRRKRPAFSRK

SEQ ID NO: 39690 - protein, 47 aa, Artificial Sequence
  Quasi-synthetic sequence derived from human genome
AAPRALLPQWPRRPGRRWPASPLGMKVFRRKALVLCAGYALLLVLTM

SEQ ID NO: 39691 - protein, 47 aa, Artificial Sequence
  Quasi-synthetic sequence derived from human genome
KKKTTFFKRGKKLKCYLMPFGTGTSKCPGRFFALMEIKQLLVILLTY

SEQ ID NO: 39692 - protein, 47 aa, Artificial Sequence
  Quasi-synthetic sequence derived from human genome
KKLLNGLCPKITYLFYKLFTLLSWMLSVVLLLFLNVKIALFLLLFLW

SEQ ID NO: 39693 - protein, 47 aa, Artificial Sequence
  Quasi-synthetic sequence derived from human genome
RRVATWFNQPARKIRRRKARQAKARRIAPRPASGPIRPIVRCPTVRY

SEQ ID NO: 39694 - protein, 47 aa, Artificial Sequence
  Quasi-synthetic sequence derived from human genome
RPHAARGAPRGSRRPGRTPKWRLPRISARAPYRLRRLRRHTYWPPRR

SEQ ID NO: 39695 - protein, 47 aa, Artificial Sequence
  Quasi-synthetic sequence derived from human genome
YKVVGRCLPTPKCHTPPLYRMRIFAPNHVVAKSRFWYFVSQLKKMKK

SEQ ID NO: 39696 - protein, 47 aa, Artificial Sequence
  Quasi-synthetic sequence derived from human genome
LRHVPLRRVHLFTFLQVLCLALLWILKSTVAAIIFPVMILALVAVRK

SEQ ID NO: 39697 - protein, 47 aa, Artificial Sequence
  Quasi-synthetic sequence derived from human genome
RLVVYKIVYMFLFLLCLTLFQVYYSLWRKLLKAFWWLVVAYTMLVLI

SEQ ID NO: 39698 - protein, 47 aa, Artificial Sequence
  Quasi-synthetic sequence derived from human genome
SCPFCLKLLLPGLLLLLVVIILILAFWVLPKYKTRKAMRNNVPRDRG

SEQ ID NO: 39699 - protein, 47 aa, Artificial Sequence
  Quasi-synthetic sequence derived from human genome
LQNFLKITSTRLLCSRLCQQLRSKRKFFGTVPISRLHRRVVITGIGL

SEQ ID NO: 39700 - protein, 47 aa, Artificial Sequence
  Quasi-synthetic sequence derived from human genome
KVKKAKAKSRIKMKKARKILAEKRAAAPVVSVPCIPPHRLSKITNRL

SEQ ID NO: 39701 - protein, 47 aa, Artificial Sequence
  Quasi-synthetic sequence derived from human genome
LLLTFVLPLVVTLFCYCRISRRLRRPPHVGRARRNSLRIIFAIESTF

SEQ ID NO: 39702 - protein, 47 aa, Artificial Sequence
  Quasi-synthetic sequence derived from human genome
RLMRLEYQRLLGGRDALFTIQWNIRAFNAVKNWSWMKLFFKMKPLLR

SEQ ID NO: 39703 - protein, 47 aa, Artificial Sequence
  Quasi-synthetic sequence derived from human genome
FRCVRLLRIFKVTRHWTSLSNLVASLLNSMKSIASLLLLLFLFIIIF

SEQ ID NO: 39704 - protein, 47 aa, Artificial Sequence
  Quasi-synthetic sequence derived from human genome
ISLCARVRKLRSAGRCGKFHQVRRVMTILFLTMVISYFGCMKAAPMK

SEQ ID NO: 39705 - protein, 47 aa, Artificial Sequence
  Quasi-synthetic sequence derived from human genome
RRFSPPRRMLPPPPMWRRSPPRMRRRSRSPRRRSPVRRRSRSPGRRR

SEQ ID NO: 39706 - protein, 47 aa, Artificial Sequence
  Quasi-synthetic sequence derived from human genome
PKRRKKRYLRHDKPPYTYLAMIALVIQAAPSRRLKLAQIIRQVQAVF

SEQ ID NO: 39707 - protein, 47 aa, Artificial Sequence
  Quasi-synthetic sequence derived from human genome
WLKNRTLDEYLTYLLLWVKQRKDLLHLCCKKLKILGMPFRNIRSILK

SEQ ID NO: 39708 - protein, 47 aa, Artificial Sequence
  Quasi-synthetic sequence derived from human genome
FRKPYVRRRPSKRRGARAFRCIKPAPVIHPASVIFTVPATTVKIVSL

SEQ ID NO: 39709 - protein, 47 aa, Artificial Sequence
  Quasi-synthetic sequence derived from human genome
MAVLRQLALLLWKNYTLQKRKVLVTVLELFLPLLFSGILIWLRLKIQ

SEQ ID NO: 39710 - protein, 47 aa, Artificial Sequence
  Quasi-synthetic sequence derived from human genome
LKNTLRASVFLVRRAIKDIVTSVFQASLKLLKMIITQYIPKHKLSKL

SEQ ID NO: 39711 - protein, 47 aa, Artificial Sequence
  Quasi-synthetic sequence derived from human genome
MCFLRRPGAPASWIWWRMLRQVLRRGLQSFCHRLGLCVSRHPVFFLT

SEQ ID NO: 39712 - protein, 47 aa, Artificial Sequence
  Quasi-synthetic sequence derived from human genome
LKRFLLARRSRRGLFAQIVLPALFVGLALVFSLIVPPFGHYPALRLS

SEQ ID NO: 39713 - protein, 47 aa, Artificial Sequence
  Quasi-synthetic sequence derived from human genome
RYLAIVHPMKSRLRRTMLVAKVTCIIIWLLAGLASLPAIIHRNVFFI

SEQ ID NO: 39714 - protein, 47 aa, Artificial Sequence
  Quasi-synthetic sequence derived from human genome
ARVLQEAWMFYKHTRRKESHAARRHQRKLLAAINAFRQVRLKHRKLR

SEQ ID NO: 39715 - protein, 47 aa, Artificial Sequence
  Quasi-synthetic sequence derived from human genome
RRKPTCKKIMTVLTVGIFWPVLSLCYLIAPKSQFGRIIHTPFMKFII

SEQ ID NO: 39716 - protein, 47 aa, Artificial Sequence
  Quasi-synthetic sequence derived from human genome
RLGIHLIRRKIVKPKHHVLMSRKESWKVKSEIPKVPKQPLVLHHPRM

SEQ ID NO: 39717 - protein, 47 aa, Artificial Sequence
  Quasi-synthetic sequence derived from human genome
RLLFRIGYSLYTRTWLGYLFYRQQLRRARNRYPKGHSKTQPRLFNGV

SEQ ID NO: 39718 - protein, 47 aa, Artificial Sequence
  Quasi-synthetic sequence derived from human genome
ALRRAVKRHRERRERQKRVFRMSLLIISTFLLCWTPISVLNTTILCL

SEQ ID NO: 39719 - protein, 47 aa, Artificial Sequence
  Quasi-synthetic sequence derived from human genome
FKNLFYRTYMLFKNASGKRRFLLCLLLFTVITYFFVVIGIAPIFILY

SEQ ID NO: 39720 - protein, 47 aa, Artificial Sequence
  Quasi-synthetic sequence derived from human genome
APWEVLGRYAEQMNVRMPFRRKIYYLPRRYKFMSRIDKQISRFRRWL

SEQ ID NO: 39721 - protein, 47 aa, Artificial Sequence
  Quasi-synthetic sequence derived from human genome
MVKRTITRQQWKKKALRSMPKSRNQVLFRRNLTPSQLRTLAPPYMLL

SEQ ID NO: 39722 - protein, 47 aa, Artificial Sequence
  Quasi-synthetic sequence derived from human genome
VRSSVHARWIVGKVIGTKMQKTAKVRVTRLVLDPYLLKYFNKRKTYF

SEQ ID NO: 39723 - protein, 47 aa, Artificial Sequence
  Quasi-synthetic sequence derived from human genome
FSSWLATSLSMFYLLRIANFSNLIFLRIKRRVKSVVLVILLGPLLFL

SEQ ID NO: 39724 - protein, 47 aa, Artificial Sequence
  Quasi-synthetic sequence derived from human genome
FVIQLQARLRGFLVRQKFAEHSHFLRTWLPAVIKIQAHWRGYRQRKI

SEQ ID NO: 39725 - protein, 47 aa, Artificial Sequence
  Quasi-synthetic sequence derived from human genome
YFGVRALHRLHQFQQLLWVLGLLVGLLLLLLGLGACYTWRRRRVCKQ

SEQ ID NO: 39726 - protein, 47 aa, Artificial Sequence
  Quasi-synthetic sequence derived from human genome
IWAELAKVARKQGVWDVCRTASRFCLLYDNVKVKKLRLRRGKKKRGR

SEQ ID NO: 39727 - protein, 47 aa, Artificial Sequence
  Quasi-synthetic sequence derived from human genome
RPFQCCFCQKGFKIQSKLLKHKQIHTRNKAFRALLLKKRRTESRPLP

SEQ ID NO: 39728 - protein, 47 aa, Artificial Sequence
  Quasi-synthetic sequence derived from human genome
IKKIKKVQSFLRGWLCRRKWKTIIQDYIRSPHADSMRKRNQVVFSML

SEQ ID NO: 39729 - protein, 47 aa, Artificial Sequence
  Quasi-synthetic sequence derived from human genome
KQMRLQRKAVISLQSYFRMRKARQYYLKMYKAIIVIQNYYHAYKAQV

SEQ ID NO: 39730 - protein, 47 aa, Artificial Sequence
  Quasi-synthetic sequence derived from human genome
LKNKLKVRTAYPSLRLIHAVRGYWLTNKVPIKRPSTGLLMYTLATRF

SEQ ID NO: 39731 - protein, 47 aa, Artificial Sequence
  Quasi-synthetic sequence derived from human genome
NPLRYSSILTSNRVAKMGLILAIRSILLVIPFPFTLRRLKYCQKNLL

SEQ ID NO: 39732 - protein, 47 aa, Artificial Sequence
  Quasi-synthetic sequence derived from human genome
MRLTRKRLCSFLIALYCLFSLYAAYHVFFGRRRQAPAGSPRGLRKGA

SEQ ID NO: 39733 - protein, 47 aa, Artificial Sequence
  Quasi-synthetic sequence derived from human genome
TFLWFRSKQEALKQGWLHKKGGGSSTLSRRNWKKRWFVLRQSKLMYF

SEQ ID NO: 39734 - protein, 47 aa, Artificial Sequence
  Quasi-synthetic sequence derived from human genome
FGKVLLAKRKLDGKFYAVKVLQKKIVLNRKEQKHIMAERNVLLKNVK

SEQ ID NO: 39735 - protein, 47 aa, Artificial Sequence
  Quasi-synthetic sequence derived from human genome
AKQPAKKKRKKGLRIKGKRRRKKLILAKKFSKDLGSGRPVADAPALL

SEQ ID NO: 39736 - protein, 47 aa, Artificial Sequence
  Quasi-synthetic sequence derived from human genome
WLKNRTLDEYLTCLLLWVKQRRDLLHLCCKKLKILGMPFRNIRSILK

SEQ ID NO: 39737 - protein, 47 aa, Artificial Sequence
  Quasi-synthetic sequence derived from human genome
FSIWLATSLSIFYLLKIVNFSRLIFHHLKRKAKSVVLVIVLGSLFFL

SEQ ID NO: 39738 - protein, 47 aa, Artificial Sequence
  Quasi-synthetic sequence derived from human genome
LLIPKFARWFSVPWKVIFVFALLAFLFFTSWYSSYGFTRRWNCILMR

SEQ ID NO: 39739 - protein, 47 aa, Artificial Sequence
  Quasi-synthetic sequence derived from human genome
KVRQLIKQQSIAALKIQSAFRGYNKRVKYQSVLQSIIKIQRWYRAYK

SEQ ID NO: 39740 - protein, 47 aa, Artificial Sequence
  Quasi-synthetic sequence derived from human genome
LRIRRLLRPFFLLQNSSMMKKTLKCIRWSLPEMASVGLLLAIHLCLF

SEQ ID NO: 39741 - protein, 47 aa, Artificial Sequence
  Quasi-synthetic sequence derived from human genome
WRQQLAARRQEQRATVRALWFWAFSLQAKVWATWLAFVLERRRKKAR

SEQ ID NO: 39742 - protein, 47 aa, Artificial Sequence
  Quasi-synthetic sequence derived from human genome
LFRIKIQGATGKFNMVIPLVDGMIVSRRALGFLVRQTVINICRRKRL

SEQ ID NO: 39743 - protein, 47 aa, Artificial Sequence
  Quasi-synthetic sequence derived from human genome
LRALLLWGRRLRPLLRAPALAAVPGGKPILCPRRTTAQLGPRRNPAW

SEQ ID NO: 39744 - protein, 47 aa, Artificial Sequence
  Quasi-synthetic sequence derived from human genome
RANRIRSNSSAANLMAKKRVIRMLIVIVVLFFLCWMPIFSANAWRAY

SEQ ID NO: 39745 - protein, 47 aa, Artificial Sequence
  Quasi-synthetic sequence derived from human genome
RCYRKYKQLTWIALKFALYKKMTQAAILIQSKFRSYYEQKRFQQSRR

SEQ ID NO: 39746 - protein, 47 aa, Artificial Sequence
  Quasi-synthetic sequence derived from human genome
LFRKPQRSFFGKLLREFRLVAADRRSWKILLFGVINLICTGFLLMWC

SEQ ID NO: 39747 - protein, 47 aa, Artificial Sequence
  Quasi-synthetic sequence derived from human genome
IPLKVISRGRSAKAPGWLSYSLRFGGQKHVVHMRVKKLLVSRHLPVF

SEQ ID NO: 39748 - protein, 47 aa, Artificial Sequence
  Quasi-synthetic sequence derived from human genome
YIPRKRGKNPMKAVGLAWYSLYTRTWLGYLFYRQQLRRARNRYPKGH

SEQ ID NO: 39749 - protein, 47 aa, Artificial Sequence
  Quasi-synthetic sequence derived from human genome
ALCTLRGRRCHCLPFPKRGMQRWMLPLRRGARLLPLASSKNPRARSP

SEQ ID NO: 39750 - protein, 47 aa, Artificial Sequence
  Quasi-synthetic sequence derived from human genome
PLRVLPSVFWSPPSRKKPVLSARNSRMFGHLSPVRIPHLRGKFNLRL

SEQ ID NO: 39751 - protein, 47 aa, Artificial Sequence
  Quasi-synthetic sequence derived from human genome
LGAAWLLAWPGLALPLVAMAAGGRWVRQQGPRVRRGISRLWLRVLLR

SEQ ID NO: 39752 - protein, 47 aa, Artificial Sequence
  Quasi-synthetic sequence derived from human genome
WKTHVWQDEKRRPKRREIPLKVLVKAVLFACMLMRKTMASRVRVTIL

SEQ ID NO: 39753 - protein, 47 aa, Artificial Sequence
  Quasi-synthetic sequence derived from human genome
RRRAKKARLLGPTVMLGGCEFSRQRLQAFGLNPKRLHFRQLGRQRRK

SEQ ID NO: 39754 - protein, 47 aa, Artificial Sequence
  Quasi-synthetic sequence derived from human genome
LRLAHGVRLKANKDSLYKPILRQKKHFNSLHIPKALQKALPFKNKPK

SEQ ID NO: 39755 - protein, 47 aa, Artificial Sequence
  Quasi-synthetic sequence derived from human genome
WRAKMSRGNSKQRKLKINPKRYKGNFLQSCVQLRASRLRTPTWVRRR

SEQ ID NO: 39756 - protein, 47 aa, Artificial Sequence
  Quasi-synthetic sequence derived from human genome
RGRPRLRLGERGLMEPLLPPKRRLLPRVRLLPLLLALAVGSAFYTIW

SEQ ID NO: 39757 - protein, 47 aa, Artificial Sequence
  Quasi-synthetic sequence derived from human genome
VYQHNLFFLLSLGIILFCYVEILRTLFRSRSKRRHRTVKLIFAIVVA

SEQ ID NO: 39758 - protein, 47 aa, Artificial Sequence
  Quasi-synthetic sequence derived from human genome
RQRIILRVWWSTWRQRLGQVRVSRALHASALKHRALSLQVQAWSQWR

SEQ ID NO: 39759 - protein, 47 aa, Artificial Sequence
  Quasi-synthetic sequence derived from human genome
RKPLSGRTPRLVYKWFLLIYKLSYAFGVVGYLAIMFTMCGFNLFFKI

SEQ ID NO: 39760 - protein, 47 aa, Artificial Sequence
  Quasi-synthetic sequence derived from human genome
RKRLQRVMTKALDHGPDMKAVINMYGRLIHRVRYRRGLWRTRQILNL

SEQ ID NO: 39761 - protein, 47 aa, Artificial Sequence
  Quasi-synthetic sequence derived from human genome
HKATTIQKHVRGWMARRHFQRLRDAAIVIQCAFRMLKARRELKALRI

SEQ ID NO: 39762 - protein, 47 aa, Artificial Sequence
  Quasi-synthetic sequence derived from human genome
LIPHKKFTFAKMWILYAQFEIRQKNLSLARRALGTSIGKCPKNKLFK

SEQ ID NO: 39763 - protein, 47 aa, Artificial Sequence
  Quasi-synthetic sequence derived from human genome
VRPWKRAAILNYTKGLYFQAFGGRRRCLSKSVAPLLAHGYRRFLPTK

SEQ ID NO: 39764 - protein, 47 aa, Artificial Sequence
  Quasi-synthetic sequence derived from human genome
PLTIVFKHKHKDCVLYLLSKMWSTVSFPKISVPMRIYIKIKQWILRA

SEQ ID NO: 39765 - protein, 47 aa, Artificial Sequence
  Quasi-synthetic sequence derived from human genome
VATMRKPRCSLPDVLGVAGLVRRRRRYALSGSVWKKRTLTWRVRSFP

SEQ ID NO: 39766 - protein, 47 aa, Artificial Sequence
  Quasi-synthetic sequence derived from human genome
VKVFHKLLNSNRHNTKHTGKKPFKCKKCGKSFCMLLHLCQHKRIHIR

SEQ ID NO: 39767 - protein, 47 aa, Artificial Sequence
  Quasi-synthetic sequence derived from human genome
RMWRIRRRYCQVLNAVRIIQAYWRCRSCASRGFIKGQYRVTANQLHL

SEQ ID NO: 39768 - protein, 47 aa, Artificial Sequence
  Quasi-synthetic sequence derived from human genome
ARIVRALFEIALRKRWPTMTYRLLNLSKVIDKRLWGWASPLRQFSIL

SEQ ID NO: 39769 - protein, 47 aa, Artificial Sequence
  Quasi-synthetic sequence derived from human genome
SPFLLAGLIGGAVIFVLVVLLSVFCWHMHKKGRYTSQKWKYNRGRRK

SEQ ID NO: 39770 - protein, 47 aa, Artificial Sequence
  Quasi-synthetic sequence derived from human genome
MRLKKHRWYKKILKSRDPIIFSVGWRRFQTIPLYYIEDHNGRQRLLK

SEQ ID NO: 39771 - protein, 47 aa, Artificial Sequence
  Quasi-synthetic sequence derived from human genome
WLKNRTLDEYLTCLLLWVKQRKDLLHLCCKKLKILGMPFRNIRSILK

SEQ ID NO: 39772 - protein, 47 aa, Artificial Sequence
  Quasi-synthetic sequence derived from human genome
KGLRSICMHTKKRVSSFRGNKIGLKDVITLRRHVETKVRAKIRKRKV

SEQ ID NO: 39773 - protein, 47 aa, Artificial Sequence
  Quasi-synthetic sequence derived from human genome
RRRRYTLTPARLRWDHFNLTYRILSFPRNLLSPRETRRALAAAFRMW

SEQ ID NO: 39774 - protein, 47 aa, Artificial Sequence
  Quasi-synthetic sequence derived from human genome
IYCHKLTIILTKWRNTARHKSKKKEDELILKHELQLKKWKNRLILKR

SEQ ID NO: 39775 - protein, 47 aa, Artificial Sequence
  Quasi-synthetic sequence derived from human genome
RTALRVLQLVAGFLLPLLVMAYCYAHILAVLLVSRGQRRLRAMRLVV

SEQ ID NO: 39776 - protein, 47 aa, Artificial Sequence
  Quasi-synthetic sequence derived from human genome
VQRRKKRLRHRVPPRKPEPLVKLHRTALHWACLKGHSQLVNKLLVAG

SEQ ID NO: 39777 - protein, 47 aa, Artificial Sequence
  Quasi-synthetic sequence derived from human genome
IFVFFRKLTTIFPLNWKYRKALSLGCQRVTLHKNMFLTYILNSMIII

SEQ ID NO: 39778 - protein, 47 aa, Artificial Sequence
  Quasi-synthetic sequence derived from human genome
VLKSLKFSLFIVCTVTLTLFLMTILTVTKFRGFCFICYKTAQRLVFK

SEQ ID NO: 39779 - protein, 47 aa, Artificial Sequence
  Quasi-synthetic sequence derived from human genome
KRMKMVSQSFTQRFRLSRDRKVAKSLAVIVSIFGLCWAPYTLLMIIR

SEQ ID NO: 39780 - protein, 47 aa, Artificial Sequence
  Quasi-synthetic sequence derived from human genome
LNVAKMFPKVRESQLLLNVVSQLAKRNLRLLVLGRKHMLRRSSQWSR

SEQ ID NO: 39781 - protein, 47 aa, Artificial Sequence
  Quasi-synthetic sequence derived from human genome
KRNLYYFSYPLFVGFALLRLVAFHLGLLFVWLCQRFSRALMAAKRSS

SEQ ID NO: 39782 - protein, 47 aa, Artificial Sequence
  Quasi-synthetic sequence derived from human genome
MKWLLLLGLVALSECIMYKVPLIRKKSLRRTLSERGLLKDFLKKHNL

SEQ ID NO: 39783 - protein, 47 aa, Artificial Sequence
  Quasi-synthetic sequence derived from human genome
KWIVKPPASARGIGIQVIHKWSQLPKRRPLLVQRYLHKPYLISGSKF

SEQ ID NO: 39784 - protein, 47 aa, Artificial Sequence
  Quasi-synthetic sequence derived from human genome
YCSILFLTCISVHRCLGVLRPLRSLRWGRARYARRVAGAVWVLVLAC

SEQ ID NO: 39785 - protein, 47 aa, Artificial Sequence
  Quasi-synthetic sequence derived from human genome
FRLFRVMRLVKLLSKGEGIRTLLWTFIKSFQALPYVALLIAMIFFIY

SEQ ID NO: 39786 - protein, 47 aa, Artificial Sequence
  Quasi-synthetic sequence derived from human genome
RIARILAGSKKKICTRKPRFMSAWAQVIIASILISVQLTLVVTLIIM

SEQ ID NO: 39787 - protein, 47 aa, Artificial Sequence
  Quasi-synthetic sequence derived from human genome
RNEKNRPRRRFLCHLSRQQLRMAMRIPVLYEQLKREKLRVHKARQWK

SEQ ID NO: 39788 - protein, 47 aa, Artificial Sequence
  Quasi-synthetic sequence derived from human genome
RSILLKTLCKLVDVGSDSLSLKLAKIILALKVSRKNLLNVCKLIFKI

SEQ ID NO: 39789 - protein, 47 aa, Artificial Sequence
  Quasi-synthetic sequence derived from human genome
RKYDKEKVLLQLRYTGILETARIRRLGFSHRILFANFIKRYYLLCYK

SEQ ID NO: 39790 - protein, 47 aa, Artificial Sequence
  Quasi-synthetic sequence derived from human genome
TILRSLTDAVPLSVLILGLLIMFITIVFCAAGIVVLVLHRRRRYKKK

SEQ ID NO: 39791 - protein, 47 aa, Artificial Sequence
  Quasi-synthetic sequence derived from human genome
LLAFLQRRQRRRQDSRVVARSVRILVASFFLCWFPNHVVTLWGVLVK

SEQ ID NO: 39792 - protein, 47 aa, Artificial Sequence
  Quasi-synthetic sequence derived from human genome
VARRCGRPRRRDPRRRRTPALPRPWPGRGGPGRSLLHRHLFIQQLLR

SEQ ID NO: 39793 - protein, 47 aa, Artificial Sequence
  Quasi-synthetic sequence derived from human genome
VVFKAKVKRRPEMSRGLLAVRGAFVGASLLFLLVNVLCAVLSHRRRA

SEQ ID NO: 39794 - protein, 47 aa, Artificial Sequence
  Quasi-synthetic sequence derived from human genome
HPFLLLILLCMSLLLFQVIRLYQRRRWMIRALHLFPAPPAHWFYGHK

SEQ ID NO: 39795 - protein, 47 aa, Artificial Sequence
  Quasi-synthetic sequence derived from human genome
LRYLFQWVYQRRGLVHLCCSKLVNYLTPIKHLRKSLKIIYLNSIQQL

SEQ ID NO: 39796 - protein, 47 aa, Artificial Sequence
  Quasi-synthetic sequence derived from human genome
LMAFLIMVVVYLRIYVYVKRKTNVLSPHTSGSISRRRTPMKLMKTVM

SEQ ID NO: 39797 - protein, 47 aa, Artificial Sequence
  Quasi-synthetic sequence derived from human genome
LKLKVMDLRGKFKRPPLRRVRVSADAMLRALLGSKHKVSMDLRANLK

SEQ ID NO: 39798 - protein, 47 aa, Artificial Sequence
  Quasi-synthetic sequence derived from human genome
LKTKVVHLSKLPKDTALLLDPNIYRTMPQKRLKRTLIRKVFNLYLSK

SEQ ID NO: 39799 - protein, 47 aa, Artificial Sequence
  Quasi-synthetic sequence derived from human genome
KRNWRKPRGIDNRVRRRFKGQILMPNIGYGSNKKTKHMLPSGFRKFL

SEQ ID NO: 39800 - protein, 47 aa, Artificial Sequence
  Quasi-synthetic sequence derived from human genome
YLNLKKTAIKIQSVYRGIRVRRHIQHMHRAATFIKAMFKMHQSRISY

SEQ ID NO: 39801 - protein, 47 aa, Artificial Sequence
  Quasi-synthetic sequence derived from human genome
ILIKQVLNWMLRKLSCRCCARCCPAPGAPLARRNAITPGSRLRRRLA

SEQ ID NO: 39802 - protein, 47 aa, Artificial Sequence
  Quasi-synthetic sequence derived from human genome
VLRETWLIYKHTKLLKKIDHAKVRKHQRKFLQAIHQLRSVKMEQRKL

SEQ ID NO: 39803 - protein, 47 aa, Artificial Sequence
  Quasi-synthetic sequence derived from human genome
FYRNHKTFMVLNRKRTIYRFSAKHALFIFGPFNSIRSLAIRVSVHSL

SEQ ID NO: 39804 - protein, 47 aa, Artificial Sequence
  Quasi-synthetic sequence derived from human genome
MRLWKARVLKLVLKTAKDSRLGLNSKWLSLKLGDAGNPRSLAIRFIL

SEQ ID NO: 39805 - protein, 47 aa, Artificial Sequence
  Quasi-synthetic sequence derived from human genome
RVITGTMALLFSFFFIIFIVFISRKCCPPTLRRIRQCSMVQNHRQLR

SEQ ID NO: 39806 - protein, 47 aa, Artificial Sequence
  Quasi-synthetic sequence derived from human genome
FSITRPLTYRAKRTTKRAGVMIGLAWVISFVLWAPAILFWQYFVGKR

SEQ ID NO: 39807 - protein, 47 aa, Artificial Sequence
  Quasi-synthetic sequence derived from human genome
KALRAFRVLRPLRLVSGVPSLHIVLNSIMKALVPLLHIALLVLFVII

SEQ ID NO: 39808 - protein, 47 aa, Artificial Sequence
  Quasi-synthetic sequence derived from human genome
FYVNENTFKERLKLFFIKNQRSSLRIRLFNFSLKLLTCLLYIVRVLL

SEQ ID NO: 39809 - protein, 47 aa, Artificial Sequence
  Quasi-synthetic sequence derived from human genome
SGHLALILSSIFGLLLLVLFILFLTWCRVQKQKHLPLRVSTRRRGSL

SEQ ID NO: 39810 - protein, 47 aa, Artificial Sequence
  Quasi-synthetic sequence derived from human genome
FKKSLLAALILCLLVVRFDPASPSSLHFLYKLAQLFRWIRKAAFSRL

SEQ ID NO: 39811 - protein, 47 aa, Artificial Sequence
  Quasi-synthetic sequence derived from human genome
LYHALPFFCFLLGKCFKKGLKGKGFVLLVKLACIVVASFVLCWLPFF

SEQ ID NO: 39812 - protein, 47 aa, Artificial Sequence
  Quasi-synthetic sequence derived from human genome
GTVLTVRPPLLPYIVNIKGQRIKKSVAYKTKKPPSLMYNVRKKKGKI

SEQ ID NO: 39813 - protein, 47 aa, Artificial Sequence
  Quasi-synthetic sequence derived from human genome
FKGGRCWRFRGPKPVWGLPQLCRAGGLPRHPDAALFFPPLRRLILFK

SEQ ID NO: 39814 - protein, 47 aa, Artificial Sequence
  Quasi-synthetic sequence derived from human genome
RQLAVRPSTPHTITLQPSSFRNLRLPKRLRVVYFLARTRLAQRLIMA

SEQ ID NO: 39815 - protein, 47 aa, Artificial Sequence
  Quasi-synthetic sequence derived from human genome
RDSIRASAVGLLGTLVRRGRGGLRLGLRGPLRKLVLQSLVPLLLRLH

SEQ ID NO: 39816 - protein, 47 aa, Artificial Sequence
  Quasi-synthetic sequence derived from human genome
RSRKDFKRYLLNFIAAMPLISLVNNFLKYGLNELKLCFRVRLTKYLY

SEQ ID NO: 39817 - protein, 47 aa, Artificial Sequence
  Quasi-synthetic sequence derived from human genome
RVLKRKTFNKVLGHVNNILISAVLPTAFRVAKKRAPKVLGTTLVVGL

SEQ ID NO: 39818 - protein, 47 aa, Artificial Sequence
  Quasi-synthetic sequence derived from human genome
RPHLPGKKKIRWDPVRRRFIQSCPIIRIPNRFLRGHRPPPARSGHRC

SEQ ID NO: 39819 - protein, 47 aa, Artificial Sequence
  Quasi-synthetic sequence derived from human genome
LKAKRKVVKMMIIVVMTFAICWLPYHIYFILTAIYQQLNRWKYIQQV

SEQ ID NO: 39820 - protein, 47 aa, Artificial Sequence
  Quasi-synthetic sequence derived from human genome
RKINKMTDKLKTHVKARTAQLAKIKWVISVAFYVLQAALMISLIWKY

SEQ ID NO: 39821 - protein, 47 aa, Artificial Sequence
  Quasi-synthetic sequence derived from human genome
LVAHTRGVPPLLKSFLQERLGIHLIRRKIVKPKHHVLMSRKESWKVK

SEQ ID NO: 39822 - protein, 47 aa, Artificial Sequence
  Quasi-synthetic sequence derived from human genome
LLGKKKKRLRVDKWWGNRKELATVRTICSHVQNMIKGVTLGFRYKMR

SEQ ID NO: 39823 - protein, 47 aa, Artificial Sequence
  Quasi-synthetic sequence derived from human genome
SIIKIQRWYRAYKTLHDTRTHFLKTKAAVISLQSAYRGWKVRKQIRR

SEQ ID NO: 39824 - protein, 47 aa, Artificial Sequence
  Quasi-synthetic sequence derived from human genome
KGMWICQICRPRKKGRKLLQKKAAQIKRRYTNPIGRPKNRLKKQNTV

SEQ ID NO: 39825 - protein, 47 aa, Artificial Sequence
  Quasi-synthetic sequence derived from human genome
RQYVVRKPLNKEGKKPRTKAPKIQRLVTPRVLQHKRRRIALKKQRTK

SEQ ID NO: 39826 - protein, 47 aa, Artificial Sequence
  Quasi-synthetic sequence derived from human genome
MMRFMLLFSRQGKLRLQKWYLATSDKERKKMVRELMQVVLARKPKMC

SEQ ID NO: 39827 - protein, 47 aa, Artificial Sequence
  Quasi-synthetic sequence derived from human genome
KTPSQKRYVAYFAQVKHLYNWNLPPRRILFIKHFIIYSIPRYVRDLK

SEQ ID NO: 39828 - protein, 47 aa, Artificial Sequence
  Quasi-synthetic sequence derived from human genome
RLRMVWRRKRKPAGRQQPNPLPHLWRRTPQTRRKSLAYAHIFSPNLC

SEQ ID NO: 39829 - protein, 47 aa, Artificial Sequence
  Quasi-synthetic sequence derived from human genome
WAYAIHGVLEVNVCPRLWMWSWKHIRKHRQKVKQYKELYKKKLTSKK

SEQ ID NO: 39830 - protein, 47 aa, Artificial Sequence
  Quasi-synthetic sequence derived from human genome
RRRRRPLQRGKPPYSYIALIAMALAHAPGRRLTLAAIYRFITERFAF

SEQ ID NO: 39831 - protein, 47 aa, Artificial Sequence
  Quasi-synthetic sequence derived from human genome
FRVRKLLDLQAKMGMQPHLQALLSLYKFFAPALISVSLPVRKKIYFK

SEQ ID NO: 39832 - protein, 47 aa, Artificial Sequence
  Quasi-synthetic sequence derived from human genome
RLILFLFCLMVLVESRKPKRKRWTGQVEMPKPSHLYKKNLDVTKIRK

SEQ ID NO: 39833 - protein, 47 aa, Artificial Sequence
  Quasi-synthetic sequence derived from human genome
LLKYVGHIFRKVKRRSLRLYARWQSRWRKKVDPSAVQGQGPGHRQRR

SEQ ID NO: 39834 - protein, 47 aa, Artificial Sequence
  Quasi-synthetic sequence derived from human genome
YYLKSNWLGLRFLRALRLLELPQILQILRAIKTSNSVKFSKLLSIIL

SEQ ID NO: 39835 - protein, 47 aa, Artificial Sequence
  Quasi-synthetic sequence derived from human genome
RLPIRMAKGLGNISAKYRWFAVFYLIIFFFLIPLTVFGLSLAGWRVL

SEQ ID NO: 39836 - protein, 47 aa, Artificial Sequence
  Quasi-synthetic sequence derived from human genome
VLFWVILVLVVVVGSSAFLLCHRRACRKRIRQKLHLCYPVQTSQPKL

SEQ ID NO: 39837 - protein, 47 aa, Artificial Sequence
  Quasi-synthetic sequence derived from human genome
RAVRNLKKKLLPWQRRGLLRAQGLRGWKARRATTGTQTLLSSGTRLK

SEQ ID NO: 39838 - protein, 47 aa, Artificial Sequence
  Quasi-synthetic sequence derived from human genome
HLFQMPLFLKLFICFIFIRSSPTIVSNKRVSKRKFIPPAFTNVSTKF

SEQ ID NO: 39839 - protein, 47 aa, Artificial Sequence
  Quasi-synthetic sequence derived from human genome
KLKSAVLTLKVILGFFLPFVVMACCYTIIIHTLIQAKKSSKHKALKV

SEQ ID NO: 39840 - protein, 47 aa, Artificial Sequence
  Quasi-synthetic sequence derived from human genome
RRFRRWLNRYSYTVLSSWPERALISLKNRSRFLVRPNTRNRAFSWTC

SEQ ID NO: 39841 - protein, 47 aa, Artificial Sequence
  Quasi-synthetic sequence derived from human genome
RLGRKRPLPACPNPLFVRWLTEWRDEATRSRRRTRFVFQKALRSLRR

SEQ ID NO: 39842 - protein, 47 aa, Artificial Sequence
  Quasi-synthetic sequence derived from human genome
RAARLIKLLRQGYTIRILLWTFVQSFKALPYVCLLIAMLFFIYAIIG

SEQ ID NO: 39843 - protein, 47 aa, Artificial Sequence
  Quasi-synthetic sequence derived from human genome
RTFMVLNKGRTISRFSATRALWLFSPFNLIRRTAIKVSVHSWFSLFI

SEQ ID NO: 39844 - protein, 47 aa, Artificial Sequence
  Quasi-synthetic sequence derived from human genome
RLFRVMRLVKLLSRGEGIRTLLWTFIKSFQALPYVALLIVMLFFIYA

SEQ ID NO: 39845 - protein, 47 aa, Artificial Sequence
  Quasi-synthetic sequence derived from human genome
VVRLILMTYFKVINQMLVFFAAKNFLVVVLQLYRLVVLALAVRASLR

SEQ ID NO: 39846 - protein, 47 aa, Artificial Sequence
  Quasi-synthetic sequence derived from human genome
TIIRYYRRYKVKSYIHEVARRFHGVKTMRDYGKHVKWPSPPKVLRRF

SEQ ID NO: 39847 - protein, 47 aa, Artificial Sequence
  Quasi-synthetic sequence derived from human genome
TVYSWRHFHTLRMTIFCLVLPLLVMAICYTGIIKTLLRCPSKKKYKA

SEQ ID NO: 39848 - protein, 47 aa, Artificial Sequence
  Quasi-synthetic sequence derived from human genome
KVCRGYLVKMGGKIKSWKKRWFVFDRLKRTLSYYVDKHETKLKGVIY

SEQ ID NO: 39849 - protein, 47 aa, Artificial Sequence
  Quasi-synthetic sequence derived from human genome
KKMIIWFPDMVKDVIGSYKKWCRSILRRTSLILARVFGLHLRLTSLH

SEQ ID NO: 39850 - protein, 47 aa, Artificial Sequence
  Quasi-synthetic sequence derived from human genome
IIHRLRRRGRSGLQPRVGKSTAILLGITTLFTLLWAPRVFVMLYHMY

SEQ ID NO: 39851 - protein, 47 aa, Artificial Sequence
  Quasi-synthetic sequence derived from human genome
LKTFVFFIWRRYWRTLVLLLLVLLTVFLLLVFYTIPGQISQVIFRPL

SEQ ID NO: 39852 - protein, 47 aa, Artificial Sequence
  Quasi-synthetic sequence derived from human genome
WRMQVFAMARLRFLKLKRQTKVLLTLLLVFGIAIFPLIVENIMYAML

SEQ ID NO: 39853 - protein, 47 aa, Artificial Sequence
  Quasi-synthetic sequence derived from human genome
LALALLCLVLSTCVGPYLFPYFIPLNGDRLLRNKKRKARGTMVRWLR

SEQ ID NO: 39854 - protein, 47 aa, Artificial Sequence
  Quasi-synthetic sequence derived from human genome
YYRSYKKCGKRRQARRTAVIVQQKLRSSLLTKKQDQAARKIMRFLRR

SEQ ID NO: 39855 - protein, 47 aa, Artificial Sequence
  Quasi-synthetic sequence derived from human genome
MVLRCLRPLRIFKLVPQMRKVVRELFSGFKEIFLVSILLLTLMLVFA

SEQ ID NO: 39856 - protein, 47 aa, Artificial Sequence
  Quasi-synthetic sequence derived from human genome
QGVVRKAGWLFFKPLVTVQKERKLELVARRKWKQYWVTLKGCTLLFY

SEQ ID NO: 39857 - protein, 47 aa, Artificial Sequence
  Quasi-synthetic sequence derived from human genome
RRYFREATMKMAVMIFKRGVFESRRKNKAVFRPKIRINLREVQTLSW

SEQ ID NO: 39858 - protein, 47 aa, Artificial Sequence
  Quasi-synthetic sequence derived from human genome
RFIKYFVKGRQAVLSMVRKAKYRELLLSELLGRRAPVVVRLGLTYHV

SEQ ID NO: 39859 - protein, 47 aa, Artificial Sequence
  Quasi-synthetic sequence derived from human genome
MRYPIWLITPQTYLIIWVITNCVSTMLLLWTFLLQRRFVKKRGKTGL

SEQ ID NO: 39860 - protein, 47 aa, Artificial Sequence
  Quasi-synthetic sequence derived from human genome
KALPKKGVLGKSPLSALARKKARLSLVIRSPSLLQSGAKKKAQTLRF

SEQ ID NO: 39861 - protein, 47 aa, Artificial Sequence
  Quasi-synthetic sequence derived from human genome
FCRMVTRKLETQKCAALRIQFFLQMAVYRRRFVQQKRAAITLQHYFR

SEQ ID NO: 39862 - protein, 47 aa, Artificial Sequence
  Quasi-synthetic sequence derived from human genome
IVYKLRRKSNFRLRGYSTGKTTAILFTITSIFATLWAPRIIMILYHL

SEQ ID NO: 39863 - protein, 47 aa, Artificial Sequence
  Quasi-synthetic sequence derived from human genome
IIYTAVLGFFAPLLVICLCYLLIVVKVRAAGVRVGCVRRRSERKVTR

SEQ ID NO: 39864 - protein, 47 aa, Artificial Sequence
  Quasi-synthetic sequence derived from human genome
RCASVIFPAWYWRRRPKRLSAVVCALLWVLSLLVTCLHNYFCVFLGR

SEQ ID NO: 39865 - protein, 47 aa, Artificial Sequence
  Quasi-synthetic sequence derived from human genome
WLKNRTLDEHLTCLLLWVKQRKDLLHLCCKKLKILGMPFRNIRSILK

SEQ ID NO: 39866 - protein, 47 aa, Artificial Sequence
  Quasi-synthetic sequence derived from human genome
FSNWPATSLSIFYLLKIANFSNLIFLRLKRRVKSVILVVLLGPLLFL

SEQ ID NO: 39867 - protein, 47 aa, Artificial Sequence
  Quasi-synthetic sequence derived from human genome
ALSVERYLAICRPLRARVLVTRRRVRALIAVLWAVALLSAGPFLFLV

SEQ ID NO: 39868 - protein, 47 aa, Artificial Sequence
  Quasi-synthetic sequence derived from human genome
WKIKLRNAIHLSSLTVTTLANLIPFTLSLICFLLLICSLCKHLKKMR

SEQ ID NO: 39869 - protein, 47 aa, Artificial Sequence
  Quasi-synthetic sequence derived from human genome
RIEIFPSRMAQTIMKARLKGAQTGRNLLKKKSDALTLRFRQILKKII

SEQ ID NO: 39870 - protein, 47 aa, Artificial Sequence
  Quasi-synthetic sequence derived from human genome
RVGRRHYCLVEHPQRSKKAVWHKLLSKQRKRAVVACFRMAPLYNLPR

SEQ ID NO: 39871 - protein, 47 aa, Artificial Sequence
  Quasi-synthetic sequence derived from human genome
LLQTKNSSKVLFRKSEKYMKLFLWLLVGVGLLGLGLRHKAYERKLGK

SEQ ID NO: 39872 - protein, 47 aa, Artificial Sequence
  Quasi-synthetic sequence derived from human genome
RLKLLLMPLKHQPDFIYLRHVPLRRVHLFTFLQVLCLALLWILKSTV

SEQ ID NO: 39873 - protein, 47 aa, Artificial Sequence
  Quasi-synthetic sequence derived from human genome
PAGLAAGTVASIILALVLLVVLLVVCGPLAYKKLVKKFRQKKQRQWI

SEQ ID NO: 39874 - protein, 47 aa, Artificial Sequence
  Quasi-synthetic sequence derived from human genome
RVRLKPKARLTPKIQKLLNREARNYTLSFKEAKMVKKFKDSKSVLLI

SEQ ID NO: 39875 - protein, 47 aa, Artificial Sequence
  Quasi-synthetic sequence derived from human genome
RYIAICKPLRYTMILTSKIISLIAGIAVLRSLYMVVPLVFLLLRLPF

SEQ ID NO: 39876 - protein, 47 aa, Artificial Sequence
  Quasi-synthetic sequence derived from human genome
MKITWYILVLLVFIFLIILTIRKILEGQRRVQKWQSHRDKPTSVLLR

SEQ ID NO: 39877 - protein, 47 aa, Artificial Sequence
  Quasi-synthetic sequence derived from human genome
EGLVKRLHKVLRPFLLRRVKVDVEKQMPKKYEHVIRCRLSKRQRCLY

SEQ ID NO: 39878 - protein, 47 aa, Artificial Sequence
  Quasi-synthetic sequence derived from human genome
FLNRYPRKKFWVGKPIARVVKKKTGEFSDKLLSLQRGLREFQGKLLR

SEQ ID NO: 39879 - protein, 47 aa, Artificial Sequence
  Quasi-synthetic sequence derived from human genome
VLIIAKMRMVALKAGWQQRKRSERKITLMVMMVVMVFVICWMPFYVV

SEQ ID NO: 39880 - protein, 47 aa, Artificial Sequence
  Quasi-synthetic sequence derived from human genome
KLRQSCVMVQKHMRGWLQRKKFLRERRAALIIQQYFRGQQTVRKAIT

SEQ ID NO: 39881 - protein, 47 aa, Artificial Sequence
  Quasi-synthetic sequence derived from human genome
LVLKLDLRMKIIQNGIFLRKYNCIGHYLQDLKGKFPGIFIRVKAMRV

SEQ ID NO: 39882 - protein, 47 aa, Artificial Sequence
  Quasi-synthetic sequence derived from human genome
LKKVVKWYLSGFYKKPKGLKKPYNPILGETFRCLWIHPRTNSKTFYI

SEQ ID NO: 39883 - protein, 47 aa, Artificial Sequence
  Quasi-synthetic sequence derived from human genome
MLTARGIIRFVIGFSLPMSIVAICYGLIAAKIHKKGMIKSSRPLRVL

SEQ ID NO: 39884 - protein, 47 aa, Artificial Sequence
  Quasi-synthetic sequence derived from human genome
AFFGLYFLVVALPYANSCANPILYGFLSYRFKQGFRRVLLRPSRRVR

SEQ ID NO: 39885 - protein, 47 aa, Artificial Sequence
  Quasi-synthetic sequence derived from human genome
ALTRKGARALAAKALARRRAYRRLNRTVAELVQFLLVKDKKKSPITR

SEQ ID NO: 39886 - protein, 47 aa, Artificial Sequence
  Quasi-synthetic sequence derived from human genome
ARRRIPRTPALCTPLALPAPTTRRRQSPWTRFQWRRRAWAAPLWPPR

SEQ ID NO: 39887 - protein, 47 aa, Artificial Sequence
  Quasi-synthetic sequence derived from human genome
RKERIEGLRKRRRLLSIIVVLVVTFALCWMPYHLVKTLYMLGSLLHW

SEQ ID NO: 39888 - protein, 47 aa, Artificial Sequence
  Quasi-synthetic sequence derived from human genome
QPRSFLRDLVETTHLFLKMLERFCRSRGNLVVQNKQKKRRKKKKKVL

SEQ ID NO: 39889 - protein, 47 aa, Artificial Sequence
  Quasi-synthetic sequence derived from human genome
RKRRRQLRASVFALALPLSLGPCWALWVAVPKASATIRGPQRRLLAS

SEQ ID NO: 39890 - protein, 47 aa, Artificial Sequence
  Quasi-synthetic sequence derived from human genome
LRLKSVRMLSGSKEKDRNLRRITRMVLVVVAVFIVCWTPIHIYVIIK

SEQ ID NO: 39891 - protein, 47 aa, Artificial Sequence
  Quasi-synthetic sequence derived from human genome
IFTLVISLGIFVFFRKLTTIFPLNWKYRKALSLGCQRVTLHKNMFLT

SEQ ID NO: 39892 - protein, 47 aa, Artificial Sequence
  Quasi-synthetic sequence derived from human genome
LAMLLRLYLVPRAVLLRSGVLLNASYRSIGALNQVRFRHWFVAKLYM

SEQ ID NO: 39893 - protein, 47 aa, Artificial Sequence
  Quasi-synthetic sequence derived from human genome
PGRMEWIIPLIVVSALTFVCLILLIAVLVYWRGCNKIKSKGFPRRFR

SEQ ID NO: 39894 - protein, 47 aa, Artificial Sequence
  Quasi-synthetic sequence derived from human genome
HRFGRNVPRYIHILLANLYVVVPPMLNPVIYGVRTKQIYKCVKKILL

SEQ ID NO: 39895 - protein, 47 aa, Artificial Sequence
  Quasi-synthetic sequence derived from human genome
VLLLLLLGLLRPLRRRSCLLAPGKGPPALGASRGPRRSWAVWYQQPR

SEQ ID NO: 39896 - protein, 47 aa, Artificial Sequence
  Quasi-synthetic sequence derived from human genome
GFKVAVIASIVSCAIILLMSMAFLTCCLLKCVKKSKRRRSNRSAQLW

SEQ ID NO: 39897 - protein, 47 aa, Artificial Sequence
  Quasi-synthetic sequence derived from human genome
KSFDALNFVTMLKMVWISKASAIQRKGRAGRCRPGICFRLFSRLRFQ

SEQ ID NO: 39898 - protein, 47 aa, Artificial Sequence
  Quasi-synthetic sequence derived from human genome
LKTLTKPVTLSRSKINKTKVLKMIFVHLIIFCFCFVPYNINLILYSL

SEQ ID NO: 39899 - protein, 47 aa, Artificial Sequence
  Quasi-synthetic sequence derived from human genome
ISLRFKRTHIKMKKQPKGYGLRCHRAIITICRLIGIKDMYAKVSGSI

SEQ ID NO: 39900 - protein, 47 aa, Artificial Sequence
  Quasi-synthetic sequence derived from human genome
KRSWPFLRSFRVLRVFKLAKSWPTLNTLIKIIGNSVGALGSLTVVLV

SEQ ID NO: 39901 - protein, 47 aa, Artificial Sequence
  Quasi-synthetic sequence derived from human genome
LIPKAKPLTLLWAYFCFLLAALGVTAGAHRLWSHRSYRAKLPLRIFL

SEQ ID NO: 39902 - protein, 47 aa, Artificial Sequence
  Quasi-synthetic sequence derived from human genome
KIMKNCGKIHLKRTKLDLLMNKLVVVIFISVVLVCLVLAFGFGFSVK

SEQ ID NO: 39903 - protein, 47 aa, Artificial Sequence
  Quasi-synthetic sequence derived from human genome
KRFQAFVKKKMSSSVVRRLGIPECILLVTQRITKYPVLFQRILQCTK

SEQ ID NO: 39904 - protein, 47 aa, Artificial Sequence
  Quasi-synthetic sequence derived from human genome
HKLYQFLHLRKAAITIQSSYRRLMVKKKLQEMQRAAVLIQATFRMYR

SEQ ID NO: 39905 - protein, 47 aa, Artificial Sequence
  Quasi-synthetic sequence derived from human genome
RLVLGFLWPLLTLTICYTFILLRTWSRRATRSTKTLKVVVAVVASFF

SEQ ID NO: 39906 - protein, 47 aa, Artificial Sequence
  Quasi-synthetic sequence derived from human genome
MKPPISRAKMILITKAAIKAIKLYKHVVQIVEKFIKKCKPEYKVPGL

SEQ ID NO: 39907 - protein, 47 aa, Artificial Sequence
  Quasi-synthetic sequence derived from human genome
WQVYGFVRACLRRLVPPGLWGSRHNERRFLRNTKKFISLGKHAKLSL

SEQ ID NO: 39908 - protein, 47 aa, Artificial Sequence
  Quasi-synthetic sequence derived from human genome
PRQRPSPRPTPRRPRPRLARPRAGQKPWLLVIRSMERVMYVMLIIQM

SEQ ID NO: 39909 - protein, 47 aa, Artificial Sequence
  Quasi-synthetic sequence derived from human genome
YKKKNTFIVLNKNRTIFRFNAASILCTLSPFNCIRRTTIKVLVHPFF

SEQ ID NO: 39910 - protein, 47 aa, Artificial Sequence
  Quasi-synthetic sequence derived from human genome
LAVTRPFLAPRLRSPALARRLLLAVWLAALLLAVPAAVYRHLWRDRV

SEQ ID NO: 39911 - protein, 47 aa, Artificial Sequence
  Quasi-synthetic sequence derived from human genome
HNKRVIGKAGRNRWLGKRPNSGRWHRKGGWAGRKIRPLPPMKSYVKL

SEQ ID NO: 39912 - protein, 47 aa, Artificial Sequence
  Quasi-synthetic sequence derived from human genome
WATFWVKVASCWACVLLYLGLLLAPLCWPPTQKPQPLILRRRRHRII

SEQ ID NO: 39913 - protein, 47 aa, Artificial Sequence
  Quasi-synthetic sequence derived from human genome
FLFAFVVPILIITVCYGLMLLRLRSVRLLSGSKEKDRSLRRITRMVL

SEQ ID NO: 39914 - protein, 47 aa, Artificial Sequence
  Quasi-synthetic sequence derived from human genome
LLVALSALFLGRWLVVRLATKWCQRKLQAELKIGSFRFFWIQNVSLK

SEQ ID NO: 39915 - protein, 47 aa, Artificial Sequence
  Quasi-synthetic sequence derived from human genome
LRVLRLLRTLRPLRVISRAPGLKLVVETLISSLKPIGNIVLICCAFF

SEQ ID NO: 39916 - protein, 47 aa, Artificial Sequence
  Quasi-synthetic sequence derived from human genome
FNRYLTRRRRIEIAHTLCLSERQVKIWFQNRRMKWKKDHKLPNTKMR

SEQ ID NO: 39917 - protein, 47 aa, Artificial Sequence
  Quasi-synthetic sequence derived from human genome
IVDKIRRKNCPACRLRKCCQAGMVLGGRKFKKFNKVRVVRALDAVAL

SEQ ID NO: 39918 - protein, 47 aa, Artificial Sequence
  Quasi-synthetic sequence derived from human genome
KTKIFIRSPKTLFYLEEQRRLRLQQLATLIQKIYRGWRCRTHYQLMR

SEQ ID NO: 39919 - protein, 47 aa, Artificial Sequence
  Quasi-synthetic sequence derived from human genome
KILRFSSPIFYGNVDGFKKCIKSTVGFDAIRVYNKRLKALRKIQKLI

SEQ ID NO: 39920 - protein, 47 aa, Artificial Sequence
  Quasi-synthetic sequence derived from human genome
LWLRLRGKGLAMLHVTRGVWGSRVRVWPLLPALLGPPRALSSLAAKM

SEQ ID NO: 39921 - protein, 47 aa, Artificial Sequence
  Quasi-synthetic sequence derived from human genome
ILYTVRTKVFQSEASKVLMLLSSIGRRKSLPSVTRPRLRVKMYNFLR

SEQ ID NO: 39922 - protein, 47 aa, Artificial Sequence
  Quasi-synthetic sequence derived from human genome
PKGQKKKKIVKYGMGGLIILFLIAIIWFPLLFMSLVRSVVGVVNQPI

SEQ ID NO: 39923 - protein, 47 aa, Artificial Sequence
  Quasi-synthetic sequence derived from human genome
HGKRLFVIRPSRFYDRRFLKLLRFYIALTGIPVAIFITLVNVFIGQA

SEQ ID NO: 39924 - protein, 47 aa, Artificial Sequence
  Quasi-synthetic sequence derived from human genome
FRLIRKMFSFKVSRWMGLACFRSLAASSPSIRQKKLMHKLQEEKAFR

SEQ ID NO: 39925 - protein, 47 aa, Artificial Sequence
  Quasi-synthetic sequence derived from human genome
YNRYLTRRRRVEIAHALCLSERQIKIWFQNRRMKWKKDHKLPNTKIR

SEQ ID NO: 39926 - protein, 47 aa, Artificial Sequence
  Quasi-synthetic sequence derived from human genome
KALRAFRVLRPLRLVSGVPSLQVVLNSIFKAMLPLFHIALLVLFMVI

SEQ ID NO: 39927 - protein, 47 aa, Artificial Sequence
  Quasi-synthetic sequence derived from human genome
VLMARRLLKPAYGTSGGLPRAKRKSVRTIAVVLAVFALCFLPFHVTR

SEQ ID NO: 39928 - protein, 47 aa, Artificial Sequence
  Quasi-synthetic sequence derived from human genome
MILRLKSVRLLSGSREKDRNLRRITRLVLVVVAVFVVCWTPIHIFIL

SEQ ID NO: 39929 - protein, 47 aa, Artificial Sequence
  Quasi-synthetic sequence derived from human genome
YLARQRYQQMRRSLVKFRSLVHAYVSRRRYLKLRAEWRCQVEGALLW

SEQ ID NO: 39930 - protein, 47 aa, Artificial Sequence
  Quasi-synthetic sequence derived from human genome
AVIKIQSSYRRWMIRKRMREMHRAATFIQSTFRMHRLHMRYQALKQA

SEQ ID NO: 39931 - protein, 47 aa, Artificial Sequence
  Quasi-synthetic sequence derived from human genome
LLKICVFIFAFIMPVLIITVCYGLMILRLKSVRMLSGSKEKDRNLRR

SEQ ID NO: 39932 - protein, 47 aa, Artificial Sequence
  Quasi-synthetic sequence derived from human genome
LRLCRPYRLAAGVKFRVLRHEAGRPLRLLMQINPLPYSRVVHTYRLP

SEQ ID NO: 39933 - protein, 47 aa, Artificial Sequence
  Quasi-synthetic sequence derived from human genome
KMNILGLLIPFTIFMFCYIKILHQLKRCQNHNKTKAIRLVLIVVIAS

SEQ ID NO: 39934 - protein, 47 aa, Artificial Sequence
  Quasi-synthetic sequence derived from human genome
RFVKWPRYIRLQRQRAILYKRLKVPPAINQFTQALDRQTATQLLKLA

SEQ ID NO: 39935 - protein, 47 aa, Artificial Sequence
  Quasi-synthetic sequence derived from human genome
SLIRKPRIVSRGRRPRSQQYSVLFKQLGVNTVRKCYKCNICGKIFLH

SEQ ID NO: 39936 - protein, 47 aa, Artificial Sequence
  Quasi-synthetic sequence derived from human genome
NMGQIVLAKKMLRKALKLLNRIFPYNLISLFLHIHVEKNRHFHYVNR

SEQ ID NO: 39937 - protein, 47 aa, Artificial Sequence
  Quasi-synthetic sequence derived from human genome
PKLSKFILISSLAILLMVSLLLLSLWKLWRVKKFLIPSVPDPKSIFP

SEQ ID NO: 39938 - protein, 47 aa, Artificial Sequence
  Quasi-synthetic sequence derived from human genome
WKVRKQIRREHQAALKIQSAFRMAKAQKQFRLFKTAALVIQQNFRAW

SEQ ID NO: 39939 - protein, 47 aa, Artificial Sequence
  Quasi-synthetic sequence derived from human genome
FRNLRLPKRLRVVYFLARTRLAQRLIMAGTVVWIGILVYTDPAGLRN

SEQ ID NO: 39940 - protein, 47 aa, Artificial Sequence
  Quasi-synthetic sequence derived from human genome
TNFLGFLLPLLIMSYCYFRIIQTLFSCKNHKKAKAIKLILLVVIVFF

SEQ ID NO: 39941 - protein, 47 aa, Artificial Sequence
  Quasi-synthetic sequence derived from human genome
RGRALGGRAVRSRRAIAVLSRWPAFPAFRAFLTFLYRYSVSGPHRLP

SEQ ID NO: 39942 - protein, 47 aa, Artificial Sequence
  Quasi-synthetic sequence derived from human genome
LTLLIPYLLTTKKKWKDCKIRVFIGGKINRIDHDRRAMATLLSKFRI

SEQ ID NO: 39943 - protein, 47 aa, Artificial Sequence
  Quasi-synthetic sequence derived from human genome
TMHLLIKYQKLLWTIPKFIVNQVRKQNTENHKKDKRAMKKLLKKMAY

SEQ ID NO: 39944 - protein, 47 aa, Artificial Sequence
  Quasi-synthetic sequence derived from human genome
FLSKNFQKHMYYNRDWYKRNFAITFFMGKVALERIWNKLKQKQKKRS

SEQ ID NO: 39945 - protein, 47 aa, Artificial Sequence
  Quasi-synthetic sequence derived from human genome
FAQMLSSVSTWLAIILLIFISLFPEILLIVLKNVRRRSARRNLSCRR

SEQ ID NO: 39946 - protein, 47 aa, Artificial Sequence
  Quasi-synthetic sequence derived from human genome
KKVYKPIILQQKPRKASEKQSIWIRTKPSDIIRKYISKYSVFLRHRY

SEQ ID NO: 39947 - protein, 47 aa, Artificial Sequence
  Quasi-synthetic sequence derived from human genome
LIKSKLPKFSQLLLQVVKPFSFVLLLGGLFLAYRMGVFILAGIRLPI

SEQ ID NO: 39948 - protein, 47 aa, Artificial Sequence
  Quasi-synthetic sequence derived from human genome
WRGYRERKNFHQQRQSLIEYKAAVTLQRAALKFLAKCRKKKKLFAPW

SEQ ID NO: 39949 - protein, 47 aa, Artificial Sequence
  Quasi-synthetic sequence derived from human genome
RHPRTGCKFKFFFRRNPYFRNKLIVKEYEVRSSGRVVSLSTPIIWRR

SEQ ID NO: 39950 - protein, 47 aa, Artificial Sequence
  Quasi-synthetic sequence derived from human genome
SFGRRVLCYPLYRHFKLVMKAYRDTIKILQLGKSAVLKCLLDIHKIF

SEQ ID NO: 39951 - protein, 47 aa, Artificial Sequence
  Quasi-synthetic sequence derived from human genome
IFYFVIQRKKWVDLAWMITFYVRFFLTYVPLLGLKAFLGLFFIVRFL

SEQ ID NO: 39952 - protein, 47 aa, Artificial Sequence
  Quasi-synthetic sequence derived from human genome
KIARKPRTPECVKGVVTDLLRRWKHWLLLLGICCPKPHGRVSSRLRL

SEQ ID NO: 39953 - protein, 47 aa, Artificial Sequence
  Quasi-synthetic sequence derived from human genome
STVEAFSRSKKKKKKKKKRQCFAFLIYFRLGIKMGKQGIINKEGYLY

SEQ ID NO: 39954 - protein, 47 aa, Artificial Sequence
  Quasi-synthetic sequence derived from human genome
LIAAKIHKKGMIKSSRPLRVLTAVVASFFICWFPFQLVALLGTVWLK

SEQ ID NO: 39955 - protein, 47 aa, Artificial Sequence
  Quasi-synthetic sequence derived from human genome
FIVWKKTFIQGGQVSLVRHKDVRRIRSLQRSVQVLRAIVVMYVICWL

SEQ ID NO: 39956 - protein, 47 aa, Artificial Sequence
  Quasi-synthetic sequence derived from human genome
RLLALIFAIVTTWMFIRSYMSFSMKTIRLPRWLAASPTKEIQVKKYK

SEQ ID NO: 39957 - protein, 47 aa, Artificial Sequence
  Quasi-synthetic sequence derived from human genome
PSVRSLLRLLAAAAACGAFAFLGYCIYLNRKRRGDPAFKRRLRDKRR

SEQ ID NO: 39958 - protein, 47 aa, Artificial Sequence
  Quasi-synthetic sequence derived from human genome
TLQLLVFTALAILIMRLKMFLTPHMCVMASLICSRQLFGWLFRRVRF

SEQ ID NO: 39959 - protein, 47 aa, Artificial Sequence
  Quasi-synthetic sequence derived from human genome
RGLILPVRTLLLKFFSKIYQTEELRSCRFRYRSKVLSRWLAGLPLQL

SEQ ID NO: 39960 - protein, 47 aa, Artificial Sequence
  Quasi-synthetic sequence derived from human genome
ALARFLLKRGLRNKRIGHFLFWFLRSEIAQSRHYQQRFAVILEAYLR

SEQ ID NO: 39961 - protein, 47 aa, Artificial Sequence
  Quasi-synthetic sequence derived from human genome
HKTRLKKILKESRQRHLENFRIRAKHLAANWNRIRTSRRTIIHIPSL

SEQ ID NO: 39962 - protein, 47 aa, Artificial Sequence
  Quasi-synthetic sequence derived from human genome
LLLLLLPLPSGAWYKHVASPRYHTVGRAAGLLMGLRRSPYLWRRALR

SEQ ID NO: 39963 - protein, 47 aa, Artificial Sequence
  Quasi-synthetic sequence derived from human genome
LFYGRKIMRKVSQSTSSLVDTSVSATSRPRMRKKLKMLNIAKKILRI

SEQ ID NO: 39964 - protein, 47 aa, Artificial Sequence
  Quasi-synthetic sequence derived from human genome
KRFALKTRSQITKRKRMSLVKEKKAAQTLSAILLAFIITWTPYNIMV

SEQ ID NO: 39965 - protein, 47 aa, Artificial Sequence
  Quasi-synthetic sequence derived from human genome
PLKNIYLPHVMLLAKIKMRIGHTVAKQVYYKNKRKDPSKWLPALHLF

SEQ ID NO: 39966 - protein, 47 aa, Artificial Sequence
  Quasi-synthetic sequence derived from human genome
KAVAVRKHLERNRKDKDAKFRLILIESRIHRLARYYKTKRVLPPNWK

SEQ ID NO: 39967 - protein, 47 aa, Artificial Sequence
  Quasi-synthetic sequence derived from human genome
KAKPESPWTSLTRKGIVRVVFFPFFFRWWLQVTSKVIFFWLLVLYLL

SEQ ID NO: 39968 - protein, 47 aa, Artificial Sequence
  Quasi-synthetic sequence derived from human genome
TNEGLKMLVTISCILVGVLLLFVLLLVVRRRRREQRLKRLRDAKSLA

SEQ ID NO: 39969 - protein, 47 aa, Artificial Sequence
  Quasi-synthetic sequence derived from human genome
VRVQRRPLKNRTDFLVPLLSSVLTVAWICCLVTAFYWCLRKRRKPGS

SEQ ID NO: 39970 - protein, 47 aa, Artificial Sequence
  Quasi-synthetic sequence derived from human genome
YARFQVTHFSWYWLWYTTKNCVGGLARKAWERLRLHRVNLIALQRRR

SEQ ID NO: 39971 - protein, 47 aa, Artificial Sequence
  Quasi-synthetic sequence derived from human genome
FKIAYRKVGQCRRFQQLKKKNGSFKRKGIERWHRAVSTNLLKQNVLV

SEQ ID NO: 39972 - protein, 47 aa, Artificial Sequence
  Quasi-synthetic sequence derived from human genome
RCLLAPVAPKLVPPVRGVKKGFRAAFRFQKELERQRLLRCPPPPVRR

SEQ ID NO: 39973 - protein, 47 aa, Artificial Sequence
  Quasi-synthetic sequence derived from human genome
VRLLYVLAIAALGGLCLILASSLLYVACLREGRRGRRRKYSLGRASR

SEQ ID NO: 39974 - protein, 47 aa, Artificial Sequence
  Quasi-synthetic sequence derived from human genome
RLVGLVYILPAAYFWRKGWLSRGMKGRVLALCGLVCFQGLLGWYMVK

SEQ ID NO: 39975 - protein, 47 aa, Artificial Sequence
  Quasi-synthetic sequence derived from human genome
LLALLANQCRFVTGLRVRRAQQIAQLYGRLYSESSRRVLLGRLWRRL

SEQ ID NO: 39976 - protein, 47 aa, Artificial Sequence
  Quasi-synthetic sequence derived from human genome
RVFMPLQAQVKAKASKPLQMQIKAPPRLRRAARVLMPLQAQVRAPRL

SEQ ID NO: 39977 - protein, 47 aa, Artificial Sequence
  Quasi-synthetic sequence derived from human genome
LFLLLLLLGTIATIVFFCCWHRKLQKGRHPMKSVFSGRSRSRDAVLR

SEQ ID NO: 39978 - protein, 47 aa, Artificial Sequence
  Quasi-synthetic sequence derived from human genome
CRPTEFAVRSGLLTVMVWVSSIFFFLPVFCLTVLYSLIGRKLWRRRR

SEQ ID NO: 39979 - protein, 47 aa, Artificial Sequence
  Quasi-synthetic sequence derived from human genome
LLFLPLLVNLCCPYFFQDIGYFLKVAAVGRRVRSYGKRRPARTILRA

SEQ ID NO: 39980 - protein, 47 aa, Artificial Sequence
  Quasi-synthetic sequence derived from human genome
KNWLGVKRQPLWTLVLILWPVIIFIILAITRTKFPPTAKPTCYLAPR

SEQ ID NO: 39981 - protein, 47 aa, Artificial Sequence
  Quasi-synthetic sequence derived from human genome
SKIFPCDKYVKVFHKFLNANRHKTRHTGKKPFKCKKCGKSFCMLLHL

SEQ ID NO: 39982 - protein, 47 aa, Artificial Sequence
  Quasi-synthetic sequence derived from human genome
PQIIKMTRILTAFKVVRTLKTGFGFTNVTAHQKWKFSRPGIRLLSVK

SEQ ID NO: 39983 - protein, 47 aa, Artificial Sequence
  Quasi-synthetic sequence derived from human genome
ILKAVKVLQASFRGVRVRRTLRKMQTAATLIQSNYRRYRQQTYFNKL

SEQ ID NO: 39984 - protein, 47 aa, Artificial Sequence
  Quasi-synthetic sequence derived from human genome
VVHLQLLRRHTLRAAERNVRRKKVSFQLERIIKKQRLLEAQKRLEKL

SEQ ID NO: 39985 - protein, 47 aa, Artificial Sequence
  Quasi-synthetic sequence derived from human genome
FKTCKEYLRPLKKFLRKLHLPRDLPQKKKLKYMKQSLVVLGDHINTF

SEQ ID NO: 39986 - protein, 47 aa, Artificial Sequence
  Quasi-synthetic sequence derived from human genome
QAVMIPQNVHRILINLMKYLQKWKRYRPLWKLDKAIVMEKFAAKKPP

SEQ ID NO: 39987 - protein, 47 aa, Artificial Sequence
  Quasi-synthetic sequence derived from human genome
LPRKKLKHIRQGTNKGLIKKKLKNMLAAVVTKKKTHKYNCKSSGWIS

SEQ ID NO: 39988 - protein, 47 aa, Artificial Sequence
  Quasi-synthetic sequence derived from human genome
MFTRAQVRRILQRVPGKQRFGIYRFLPFFFVLGGTMEWIMIKVRVGQ

SEQ ID NO: 39989 - protein, 47 aa, Artificial Sequence
  Quasi-synthetic sequence derived from human genome
FNLIHRLSLMKTSAIKKIRNPKGPLILRLGAAPVTQPTRRVFPRGLP

SEQ ID NO: 39990 - protein, 47 aa, Artificial Sequence
  Quasi-synthetic sequence derived from human genome
RYLAIVHATRTLTQKRYLVKFICLSIWGLSLLLALPVLLFRRTVYSS

SEQ ID NO: 39991 - protein, 47 aa, Artificial Sequence
  Quasi-synthetic sequence derived from human genome
KSMSGTIQLGRKLITKYNRRELTDKLLIFLALALFLATVLYIVKKRL

SEQ ID NO: 39992 - protein, 47 aa, Artificial Sequence
  Quasi-synthetic sequence derived from human genome
LLAILPYYVTIFLTESNKSVLQFQNVRRVVQIFRIMRILRILKLARH

SEQ ID NO: 39993 - protein, 47 aa, Artificial Sequence
  Quasi-synthetic sequence derived from human genome
VTGFLLPFLAVVASYSDIGRRLQARRFRRSRRTGRLVVLIILTFAAF

SEQ ID NO: 39994 - protein, 47 aa, Artificial Sequence
  Quasi-synthetic sequence derived from human genome
RVRRAAVVIQAFTRAMFVRRTYRQVLMEHKATTIQKHVRGWMARRHF

SEQ ID NO: 39995 - protein, 47 aa, Artificial Sequence
  Quasi-synthetic sequence derived from human genome
NRLLYPRQEVVQATLVVLALAMVPILLLGTPLHLLHRHRRRLRRRPA

SEQ ID NO: 39996 - protein, 47 aa, Artificial Sequence
  Quasi-synthetic sequence derived from human genome
KLSRALRYYYNKRILHKTKGKRFTYKFNFNKLVLVNYPFIDVGLAGG

SEQ ID NO: 39997 - protein, 47 aa, Artificial Sequence
  Quasi-synthetic sequence derived from human genome
KALRAFRVLRPLRLVSGVPSLQVVLNSIIKAMVPLLHIALLVLFVII

SEQ ID NO: 39998 - protein, 47 aa, Artificial Sequence
  Quasi-synthetic sequence derived from human genome
LYQKRVLTITGICIALLVVGIMCVVAYCKTKKQRKKLHDRLRQSLRS

SEQ ID NO: 39999 - protein, 47 aa, Artificial Sequence
  Quasi-synthetic sequence derived from human genome
RRGHVRIVSFLLRRNANVNLKNQKERTCLHYAVKKKFTFIDYLLIIL

SEQ ID NO: 40000 - protein, 47 aa, Artificial Sequence
  Quasi-synthetic sequence derived from human genome
VKKNRRLALELMKKAASKGLHQAVNGLGWYYHKFKKNYAKAAKYWLK

SEQ ID NO: 40001 - protein, 48 aa, Artificial Sequence
  Quasi-synthetic sequence derived from human genome
AFCLLAKGLLIFLLLVILAMGLWVIRVQKRHKMPRMKKLMRNRMKLRK

SEQ ID NO: 40002 - protein, 48 aa, Artificial Sequence
  Quasi-synthetic sequence derived from human genome
LLLKRGSCRSTWLRVRKARPQLILSRRPRRRLGSLRWCGRRRLRWRLL

SEQ ID NO: 40003 - protein, 48 aa, Artificial Sequence
  Quasi-synthetic sequence derived from human genome
RARLIPIIVLLLQKAWRGTLARWRCRRLRAIYTIMRWFRRHKVRAHLA

SEQ ID NO: 40004 - protein, 48 aa, Artificial Sequence
  Quasi-synthetic sequence derived from human genome
FRGKKARRHLKMMHIAATLIQRRFRTLMMRRRFLSLKKTAILIQRKYR

SEQ ID NO: 40005 - protein, 48 aa, Artificial Sequence
  Quasi-synthetic sequence derived from human genome
KLLRNIPRWTHLLRLLRLIILLRIFHLFHQKRQLEKLIRRRVSENKRR

SEQ ID NO: 40006 - protein, 48 aa, Artificial Sequence
  Quasi-synthetic sequence derived from human genome
LPYPVKIKVRFSFFLQIYLIMIFLGLYINFRHLYKQRRRRYGQKKKKI

SEQ ID NO: 40007 - protein, 48 aa, Artificial Sequence
  Quasi-synthetic sequence derived from human genome
RIAGVKRFLKHAGKWSLRWFLSPRWILQFRRWARKWSRFTRSSFQVRW

SEQ ID NO: 40008 - protein, 48 aa, Artificial Sequence
  Quasi-synthetic sequence derived from human genome
AFRIYAVSTLLLFLLFFLFRLLLRFLRLCRSFYITCRRLRCFPQPPRR

SEQ ID NO: 40009 - protein, 48 aa, Artificial Sequence
  Quasi-synthetic sequence derived from human genome
VLGFLARKQYRKVLYCVVIIQKNYRAFLLRRRFLHLKKAAIVFQKQLR

SEQ ID NO: 40010 - protein, 48 aa, Artificial Sequence
  Quasi-synthetic sequence derived from human genome
LRAQMLIRIVLFLQKVWRGTLARMRYKRTKAALTIIRYYRRYKVKSYI

SEQ ID NO: 40011 - protein, 48 aa, Artificial Sequence
  Quasi-synthetic sequence derived from human genome
LQRCLRGFFIKRRFRSLRHKIILLQSRARGYLARQRYQQMRRSLVKFR

SEQ ID NO: 40012 - protein, 48 aa, Artificial Sequence
  Quasi-synthetic sequence derived from human genome
YRKVLYCVVIIQKNYRAFLLRRRFLHLKKAAIVFQKQLRGQIARRVYR

SEQ ID NO: 40013 - protein, 48 aa, Artificial Sequence
  Quasi-synthetic sequence derived from human genome
KLLRNIPRWTHLVRLLRLIILIRIFHLLHQKRQLEKLMRRLVSENKRR

SEQ ID NO: 40014 - protein, 48 aa, Artificial Sequence
  Quasi-synthetic sequence derived from human genome
LRLLNKLTKWKHSRTMMLVVFKSAPILKRALKVKQAMLQLYVLKLLKL

SEQ ID NO: 40015 - protein, 48 aa, Artificial Sequence
  Quasi-synthetic sequence derived from human genome
WRQKFLRVKRSAICIQSWWRGTLGRRKAAKRKWAAQTIRRLIRGFVLR

SEQ ID NO: 40016 - protein, 48 aa, Artificial Sequence
  Quasi-synthetic sequence derived from human genome
SASKKKKKRYLRASSNRNFLLTMRPFLKRAILVLSYVLVILYFRLWIM

SEQ ID NO: 40017 - protein, 48 aa, Artificial Sequence
  Quasi-synthetic sequence derived from human genome
RRRFSGRPKLSGRLGLLGRRGFSGRLGGYWKTWIFWKTWIFWKTWIFR

SEQ ID NO: 40018 - protein, 48 aa, Artificial Sequence
  Quasi-synthetic sequence derived from human genome
RALGRRKGVWLRLRKILFCVLGLYIAIPFLIKLCPGIQAKLIFLNFVR

SEQ ID NO: 40019 - protein, 48 aa, Artificial Sequence
  Quasi-synthetic sequence derived from human genome
RKRIQYLHAKLLKKRSKQPLGEVKRRLSLYLTKIHFWLPVLKMIRKKQ

SEQ ID NO: 40020 - protein, 48 aa, Artificial Sequence
  Quasi-synthetic sequence derived from human genome
ARIIQLAVINFLAKQRLRKRVNAALVIQKYWRRVLAQRKLLMLKKEKL

SEQ ID NO: 40021 - protein, 48 aa, Artificial Sequence
  Quasi-synthetic sequence derived from human genome
KKPLIFLGCCFFSTLVLLLSIAIFQRQKRRKFWKAKNLQHIPLKKGKR

SEQ ID NO: 40022 - protein, 48 aa, Artificial Sequence
  Quasi-synthetic sequence derived from human genome
RLARAYRRSQRASFKRARRPGARALRLVLGIVLLFWACFLPFWLWQLL

SEQ ID NO: 40023 - protein, 48 aa, Artificial Sequence
  Quasi-synthetic sequence derived from human genome
LRILNKLTKWKHSRTMMLVVFKSAPILKRALKVKQAMMQLYVLKLLKV

SEQ ID NO: 40024 - protein, 48 aa, Artificial Sequence
  Quasi-synthetic sequence derived from human genome
FLRRTKAATIIQKYWRMYVVRRRYKIRRAATIVLQSYLRGFLARNRYR

SEQ ID NO: 40025 - protein, 48 aa, Artificial Sequence
  Quasi-synthetic sequence derived from human genome
RKKRSRIPLLRKRRFQLGRSMNPRARKNRSRIPLLRKRRFQLGRSMNL

SEQ ID NO: 40026 - protein, 48 aa, Artificial Sequence
  Quasi-synthetic sequence derived from human genome
RLKNIRKVYGRCMWYRLRLLKPQPNIIPTVKKIVLLAGWALFLFLAYK

SEQ ID NO: 40027 - protein, 48 aa, Artificial Sequence
  Quasi-synthetic sequence derived from human genome
RLYLQKKIIQKHFEKKKDIRRGIGYLKLICFLIPFLLSLKKKMKVPYL

SEQ ID NO: 40028 - protein, 48 aa, Artificial Sequence
  Quasi-synthetic sequence derived from human genome
LKHARHFRGRKNRCYRLAVRTVIRAFVKCTKARYLKKKNMRTLWINRI

SEQ ID NO: 40029 - protein, 48 aa, Artificial Sequence
  Quasi-synthetic sequence derived from human genome
GCRRWGQAISKSKLSRRWRRWNRFNRRRCRAAVKSVTFYWLVIVLVFL

SEQ ID NO: 40030 - protein, 48 aa, Artificial Sequence
  Quasi-synthetic sequence derived from human genome
GKRKTVKAVIDRFLRLHCGLWVRRKAGYKKKLWKKTPARKKRLREFVF

SEQ ID NO: 40031 - protein, 48 aa, Artificial Sequence
  Quasi-synthetic sequence derived from human genome
KLLPLRTFRVFRALKAISVVSRLKVIVGALLRSVKKLVNVIILTFFCL

SEQ ID NO: 40032 - protein, 48 aa, Artificial Sequence
  Quasi-synthetic sequence derived from human genome
WIFWKTWIFWKTWIFRKTYIGWKTWIFSGRCGLTGRPGFGGRRRFFWK

SEQ ID NO: 40033 - protein, 48 aa, Artificial Sequence
  Quasi-synthetic sequence derived from human genome
VKAIWWIIRTPILMTILINFLIFIRILGILLSKLRTRQMRCRDYRLRL

SEQ ID NO: 40034 - protein, 48 aa, Artificial Sequence
  Quasi-synthetic sequence derived from human genome
LKVLFKKTHRILRRLFNLCKRCHRQPRFRLPKERSLSYWWNRIQSLLY

SEQ ID NO: 40035 - protein, 48 aa, Artificial Sequence
  Quasi-synthetic sequence derived from human genome
RQRFLKLKYYSIILQSRIRMIIAVTSYKRYLWATVTIQRHWRAYLRRK

SEQ ID NO: 40036 - protein, 48 aa, Artificial Sequence
  Quasi-synthetic sequence derived from human genome
RLGFLRLQALHRSRKLHQQYRLARQRIIQFQARCRAYLVRKAFRHRLW

SEQ ID NO: 40037 - protein, 48 aa, Artificial Sequence
  Quasi-synthetic sequence derived from human genome
LRLLVKLYRFLARRTNSTFNQVVLKRLFMSRTNRPPLSLSRMIRKMKL

SEQ ID NO: 40038 - protein, 48 aa, Artificial Sequence
  Quasi-synthetic sequence derived from human genome
RARKNRSRIPLLRKRRFQLYRSTNPRARKNRSRIPLLRKRRFQLYRSM

SEQ ID NO: 40039 - protein, 48 aa, Artificial Sequence
  Quasi-synthetic sequence derived from human genome
RGQRSLLLGPARLCLRLLLLLGYRRRCPPLLRGLVQRWRYGKVCLRSL

SEQ ID NO: 40040 - protein, 48 aa, Artificial Sequence
  Quasi-synthetic sequence derived from human genome
ARVQRRPWGAWLSARLWKWLKSPRSWRLGLALLLGGALLFWVLLHRRW

SEQ ID NO: 40041 - protein, 48 aa, Artificial Sequence
  Quasi-synthetic sequence derived from human genome
AWWRGVLVRRTLLVAALRAWMIQCWWRTLVQRRIRQRRQALLRVYVIQ

SEQ ID NO: 40042 - protein, 48 aa, Artificial Sequence
  Quasi-synthetic sequence derived from human genome
RCLNKIMKTRVCRRLRRANRVLRARCRRAVKSNACYWAVLLLVFLNTL

SEQ ID NO: 40043 - protein, 48 aa, Artificial Sequence
  Quasi-synthetic sequence derived from human genome
RGNSLMNNRTGRRKSWRLEFLFLRRRCFLLTFYLWFLFFSRFLLMLFL

SEQ ID NO: 40044 - protein, 48 aa, Artificial Sequence
  Quasi-synthetic sequence derived from human genome
IQRALRAPRKKIHRRVLKKNPLKNLRIMLKLNPYAKTMRRNTILRQAR

SEQ ID NO: 40045 - protein, 48 aa, Artificial Sequence
  Quasi-synthetic sequence derived from human genome
LLIFLLLVILAMGLWVIRVQKRHKMPRMKKLMRNRMKLRKEAKPGSSP

SEQ ID NO: 40046 - protein, 48 aa, Artificial Sequence
  Quasi-synthetic sequence derived from human genome
WLLRKKYLRMRKAAITMQRYVRGYQARCYAKFLRRTKAATIIQKYWRM

SEQ ID NO: 40047 - protein, 48 aa, Artificial Sequence
  Quasi-synthetic sequence derived from human genome
SRIPLLRKRRFQLYRSMNPRARKNRSHIPLVRKRRFQLRRCMNPRARK

SEQ ID NO: 40048 - protein, 48 aa, Artificial Sequence
  Quasi-synthetic sequence derived from human genome
IRKYISKYSVFLRHRYQSRSAFLGRYLKKKKSVVSRLKKAKRTAKVLL

SEQ ID NO: 40049 - protein, 48 aa, Artificial Sequence
  Quasi-synthetic sequence derived from human genome
LLALALVGVLILFMFRRLRQFRQAQPTPQYRFRKRDKVMFYGRKIMRK

SEQ ID NO: 40050 - protein, 48 aa, Artificial Sequence
  Quasi-synthetic sequence derived from human genome
CLCLLQAFGYRLRRVIAAFYFPKREKKRILFLYNDLLKKRAAFTKLRR

SEQ ID NO: 40051 - protein, 48 aa, Artificial Sequence
  Quasi-synthetic sequence derived from human genome
YKTMKFILWRRFRWAIILFIILFILLLFLAIFIYAFPNYAAMKLVKPF

SEQ ID NO: 40052 - protein, 48 aa, Artificial Sequence
  Quasi-synthetic sequence derived from human genome
KVIFWLGYFNSCVNPLIYPCSSREFKRAFLRLLRCQCRRRRRRRPLWR

SEQ ID NO: 40053 - protein, 48 aa, Artificial Sequence
  Quasi-synthetic sequence derived from human genome
HIIRLMLKYQKILWKVPSFLITQVRRMNEATMLLKKQLPSVRKLLRRK

SEQ ID NO: 40054 - protein, 48 aa, Artificial Sequence
  Quasi-synthetic sequence derived from human genome
RARKNRSRIPLLRKRRFQLYRSMNSRARKNRSQIVLFQKRRFHFFCSM

SEQ ID NO: 40055 - protein, 48 aa, Artificial Sequence
  Quasi-synthetic sequence derived from human genome
KTIKSLRVLRVLRPLKTIKRLPKLKAVFDCVVTSLKNVFNILIVYKLF

SEQ ID NO: 40056 - protein, 48 aa, Artificial Sequence
  Quasi-synthetic sequence derived from human genome
RARKNRSRIPLLRKRRFQLYRSTNPRARKNRSRIPLLRKHRFQLYRSM

SEQ ID NO: 40057 - protein, 48 aa, Artificial Sequence
  Quasi-synthetic sequence derived from human genome
VVYSSIVSFYVPFIVTLLVYIKIYIVLRRRRKRVNTKRSSRAFRAHLR

SEQ ID NO: 40058 - protein, 48 aa, Artificial Sequence
  Quasi-synthetic sequence derived from human genome
YVKKRQAAIKLEAHWRGALARKAIQRRKWAVRIIRKFIKGFISRNKPL

SEQ ID NO: 40059 - protein, 48 aa, Artificial Sequence
  Quasi-synthetic sequence derived from human genome
RKMNHHKYRKLVKKTRFLRRKVQEGRLRRKQIKFEKDLRRIWLKAGLK

SEQ ID NO: 40060 - protein, 48 aa, Artificial Sequence
  Quasi-synthetic sequence derived from human genome
KVLFKKTHRILRRLFNLCKRCHRQPRFRLPKERSLSYWWNRIQSLLYC

SEQ ID NO: 40061 - protein, 48 aa, Artificial Sequence
  Quasi-synthetic sequence derived from human genome
LTHLRKRIHRPRRRTTRRWKRWFKFRKRKGEKRPRPNHKAVARRAKLK

SEQ ID NO: 40062 - protein, 48 aa, Artificial Sequence
  Quasi-synthetic sequence derived from human genome
KFKLFTLVSACIPVFRLARRRKKILFYCHFPDLLLTKRDSFLKRLYRA

SEQ ID NO: 40063 - protein, 48 aa, Artificial Sequence
  Quasi-synthetic sequence derived from human genome
FRVIRLARIGRILRLIRGAKGIRTLLFALMMSLPALFNIGLLLFLVMF

SEQ ID NO: 40064 - protein, 48 aa, Artificial Sequence
  Quasi-synthetic sequence derived from human genome
LFLCGLLSKAKQKLLRHLVPAAALRRKRKALWAHLFSSLRGYLKSLPR

SEQ ID NO: 40065 - protein, 48 aa, Artificial Sequence
  Quasi-synthetic sequence derived from human genome
MLLFLSVPQPRPPGARTRAGAARVARWRRLRLQQLRRLRGLLRVLRGR

SEQ ID NO: 40066 - protein, 48 aa, Artificial Sequence
  Quasi-synthetic sequence derived from human genome
LKSRKRRKMSKKLPPVIIKYIIINRFRGRKNMLVKLGKIDSKEKQVIL

SEQ ID NO: 40067 - protein, 48 aa, Artificial Sequence
  Quasi-synthetic sequence derived from human genome
LFRVIRLARIGRILRLIKGAKGIRTLLFALMMSLPALFNIGLLLFLVM

SEQ ID NO: 40068 - protein, 48 aa, Artificial Sequence
  Quasi-synthetic sequence derived from human genome
VPRSKILTVRVILAPWKKGLIAVVIIGVIIALLIIAAKCYFLRKAKAK

SEQ ID NO: 40069 - protein, 48 aa, Artificial Sequence
  Quasi-synthetic sequence derived from human genome
RLPVKKIRKQMKLLLLLLLLSCAAWLTYVHLGLVRQGRALRQRLGYGR

SEQ ID NO: 40070 - protein, 48 aa, Artificial Sequence
  Quasi-synthetic sequence derived from human genome
AMKIQATWKCYKARKFFLFYRQQKWASGVIAIAWLLYCHKTRLKKILK

SEQ ID NO: 40071 - protein, 48 aa, Artificial Sequence
  Quasi-synthetic sequence derived from human genome
RSRIPLLRKRRFQLGRSMNLRARKNRSQIVLFQKRRFQFFCSMSGRAW

SEQ ID NO: 40072 - protein, 48 aa, Artificial Sequence
  Quasi-synthetic sequence derived from human genome
RRIKLSPLMMYEKLSMIRFRYRILRSQHFRTKSKVCKLRKAQRSWVQK

SEQ ID NO: 40073 - protein, 48 aa, Artificial Sequence
  Quasi-synthetic sequence derived from human genome
RQCYRTLDRRLRKNLRALVVVHATWYVKAFLALLRPFISSKFTRKIRF

SEQ ID NO: 40074 - protein, 48 aa, Artificial Sequence
  Quasi-synthetic sequence derived from human genome
LPLRMPLSRWQRRLRRAARRQVLSGHLPFCRFRLRYPSLSPSAFWVWK

SEQ ID NO: 40075 - protein, 48 aa, Artificial Sequence
  Quasi-synthetic sequence derived from human genome
KAKQRLKRLRNIHYLFNTALFLIAWRLLIARSQMARNVWFFIVSFCYK

SEQ ID NO: 40076 - protein, 48 aa, Artificial Sequence
  Quasi-synthetic sequence derived from human genome
RYFALVQPFRLTRWRTRYKTIRINLGLWAASFILALPVWVYSKVIKFK

SEQ ID NO: 40077 - protein, 48 aa, Artificial Sequence
  Quasi-synthetic sequence derived from human genome
ALRPLVKPKIVKKRTKKFIRHQSDRYVKIKRNWRKPRGIDNRVRRRFK

SEQ ID NO: 40078 - protein, 48 aa, Artificial Sequence
  Quasi-synthetic sequence derived from human genome
FFPRRPRIHFRFPNRPFVPSRCNHRFPFQPFYWPHRYLTYRYFPRRRL

SEQ ID NO: 40079 - protein, 48 aa, Artificial Sequence
  Quasi-synthetic sequence derived from human genome
FRGMKTRRHLKSMHSSATLIQSRFRSLLVRRRFISLKKATIFVQRKYR

SEQ ID NO: 40080 - protein, 48 aa, Artificial Sequence
  Quasi-synthetic sequence derived from human genome
KIIAGSVALFLSVLVILLVIYVSWKRYPASMKQLQQRSLMRRHRKKKR

SEQ ID NO: 40081 - protein, 48 aa, Artificial Sequence
  Quasi-synthetic sequence derived from human genome
TNKYPRGVGWRILKVLLWLLAILTGLIAGKFLFHQRLFGQLLRLKMFR

SEQ ID NO: 40082 - protein, 48 aa, Artificial Sequence
  Quasi-synthetic sequence derived from human genome
IGFFRRKLIDAVGFSPLRILRKRNKALRKIRKLQKQGLLQVTPKGFIC

SEQ ID NO: 40083 - protein, 48 aa, Artificial Sequence
  Quasi-synthetic sequence derived from human genome
KYWRRVLAQRKLLMLKKEKLEKVQNKAASLIQAMWRRYRAKKYLCKVK

SEQ ID NO: 40084 - protein, 48 aa, Artificial Sequence
  Quasi-synthetic sequence derived from human genome
KKIWWIIRGPMMLCVTVNFFIFLKILKLLISKLKAHQMCFRDYKYRLA

SEQ ID NO: 40085 - protein, 48 aa, Artificial Sequence
  Quasi-synthetic sequence derived from human genome
KIFFRAGQVAYLEKLRADKLRAACIRIQKTIRGWLLRKKYLRMRKAAI

SEQ ID NO: 40086 - protein, 48 aa, Artificial Sequence
  Quasi-synthetic sequence derived from human genome
RIIWHKFKQWVIPWHLNKRYNRKRFFALPYVDHFLRLEREKRARIKAR

SEQ ID NO: 40087 - protein, 48 aa, Artificial Sequence
  Quasi-synthetic sequence derived from human genome
RYRKILREHKAVIIQKRVRGWLARTHYKRSMHAIIYLQCCFRRMMAKR

SEQ ID NO: 40088 - protein, 48 aa, Artificial Sequence
  Quasi-synthetic sequence derived from human genome
RARKNRSRIPLLRKHRFQLYRSMNSRARKNRSQIVLFQKRRFHFFCSM

SEQ ID NO: 40089 - protein, 48 aa, Artificial Sequence
  Quasi-synthetic sequence derived from human genome
LKKATIFVQRKYRATICAKHKLYQFLHLRKAAITIQSSYRRLMVKKKL

SEQ ID NO: 40090 - protein, 48 aa, Artificial Sequence
  Quasi-synthetic sequence derived from human genome
AAIVHPLRLRHLRRPRVARLLCLGVWALILVFAVPAARVHRPSRCRYR

SEQ ID NO: 40091 - protein, 48 aa, Artificial Sequence
  Quasi-synthetic sequence derived from human genome
RRRSCWRKWKQLSRLQRNMILFLLAFLLFCGLLFYINLADHWKALAFR

SEQ ID NO: 40092 - protein, 48 aa, Artificial Sequence
  Quasi-synthetic sequence derived from human genome
KQRLLFAKLFGHLTSARRARKSEVPHFRLKKVQNIKMWLSLRSYLKRR

SEQ ID NO: 40093 - protein, 48 aa, Artificial Sequence
  Quasi-synthetic sequence derived from human genome
VFIARKLQKNLKTGSFLNRLGKLLLHLFMVLCLTLFLNNIIKKILNLK

SEQ ID NO: 40094 - protein, 48 aa, Artificial Sequence
  Quasi-synthetic sequence derived from human genome
PFAIIGLCYSLIVRVLVRAHRHRGLRPRRQKALRMILAVVLVFFVCWL

SEQ ID NO: 40095 - protein, 48 aa, Artificial Sequence
  Quasi-synthetic sequence derived from human genome
KLFMRMASKQLRENVLVKRKRTKGKKLLLSIGVLLHKWKNVCIVLTAL

SEQ ID NO: 40096 - protein, 48 aa, Artificial Sequence
  Quasi-synthetic sequence derived from human genome
KKIDVIRRKVSKIQRFHARSLWTNHKRYGYKKHSYRLVKKLKLQKMKK

SEQ ID NO: 40097 - protein, 48 aa, Artificial Sequence
  Quasi-synthetic sequence derived from human genome
AMRRIRYEFKAKNIKKKKVSIMVSVDGVKVILKKKKKLLLLQKKEWTW

SEQ ID NO: 40098 - protein, 48 aa, Artificial Sequence
  Quasi-synthetic sequence derived from human genome
WRRQIYAVATLRFLKLRRERRALLCLLLVLGIAFIPIILEKIMYKVTR

SEQ ID NO: 40099 - protein, 48 aa, Artificial Sequence
  Quasi-synthetic sequence derived from human genome
SRIPLLRKRRFQLCRCMNPRARKNRSQIVLFQKLRFQFFCSMSCRAWV

SEQ ID NO: 40100 - protein, 48 aa, Artificial Sequence
  Quasi-synthetic sequence derived from human genome
WKTLQKKKQQKIKEKLRIRTKAAVKIQAWWRGTLVRRTLLHAALRAWI

SEQ ID NO: 40101 - protein, 48 aa, Artificial Sequence
  Quasi-synthetic sequence derived from human genome
KQRFLFAKLFSHITSARKARKYEIPHFRLKKVENIKIWLSLRSYLKRR

SEQ ID NO: 40102 - protein, 48 aa, Artificial Sequence
  Quasi-synthetic sequence derived from human genome
LKKKRRNFAELKIKRLRKKFAQKMLRKARRKLIYEKAKHYHKEYRQMY

SEQ ID NO: 40103 - protein, 48 aa, Artificial Sequence
  Quasi-synthetic sequence derived from human genome
RSWCLCKLLRFFYSLFFPGLIVCGTLCVCLVIVLWGIRLLLQRKKKLV

SEQ ID NO: 40104 - protein, 48 aa, Artificial Sequence
  Quasi-synthetic sequence derived from human genome
SHIPLVRKRRFQLRRCMNPRARKNRSQIVLFQKRRFHFFCSMSCRAWV

SEQ ID NO: 40105 - protein, 48 aa, Artificial Sequence
  Quasi-synthetic sequence derived from human genome
AKRCNRRLKSQILLKKYLMKRRWKKNFIAVSAANRFKKISSSGALMAL

SEQ ID NO: 40106 - protein, 48 aa, Artificial Sequence
  Quasi-synthetic sequence derived from human genome
PRWTHLLRLLRLIILLRIFHLFHQKRQLEKLIRRRVSENKRRYTRDGF

SEQ ID NO: 40107 - protein, 48 aa, Artificial Sequence
  Quasi-synthetic sequence derived from human genome
KGSRRCKKRMFKFHQMKHIFEILDKMRCLRKRSTVSFLGVLVIFLLFM

SEQ ID NO: 40108 - protein, 48 aa, Artificial Sequence
  Quasi-synthetic sequence derived from human genome
VIKLKNKIKYRAEACIKMQKTIRMWLCKRRHKPRIDGLVKVGTLKKRL

SEQ ID NO: 40109 - protein, 48 aa, Artificial Sequence
  Quasi-synthetic sequence derived from human genome
IKSLRVLRVLRPLKTIKRLPKLKAVFDCVVNSLKNVLNILIVYMLFMF

SEQ ID NO: 40110 - protein, 48 aa, Artificial Sequence
  Quasi-synthetic sequence derived from human genome
IKSLRVLRVLRPLKTIKRLPKLKAVFDCVVNSLKNVFNILIVYMLFMF

SEQ ID NO: 40111 - protein, 48 aa, Artificial Sequence
  Quasi-synthetic sequence derived from human genome
ILKRALKVKQAMLQLYVLKLLKLQTKYLGRQWRKSNMKTMSAIYQKVR

SEQ ID NO: 40112 - protein, 48 aa, Artificial Sequence
  Quasi-synthetic sequence derived from human genome
KTVKKKIKPTLPLRIFINVSRFFCVQLKKMVRLMYINSFISFPLNIVV

SEQ ID NO: 40113 - protein, 48 aa, Artificial Sequence
  Quasi-synthetic sequence derived from human genome
LGRYAEQMNVRMPFRRKIYYLPRRYKFMSRIDKQISRFRRWLPKKPMR

SEQ ID NO: 40114 - protein, 48 aa, Artificial Sequence
  Quasi-synthetic sequence derived from human genome
FALRRKKKKTIKMLMLVVVLFALCWFPLNCYVLLLSSKVIRTNNALYF

SEQ ID NO: 40115 - protein, 48 aa, Artificial Sequence
  Quasi-synthetic sequence derived from human genome
AFNVPVFWPILVMYFIMLFCITMKRQIKHMIKYRYIPFTHGKRRYRGK

SEQ ID NO: 40116 - protein, 48 aa, Artificial Sequence
  Quasi-synthetic sequence derived from human genome
RKHLNKLRNIRYGFNTILVILIWRIFIARSQMARNIWYFVVSLCYKFL

SEQ ID NO: 40117 - protein, 48 aa, Artificial Sequence
  Quasi-synthetic sequence derived from human genome
SVYLVASFLFVLMLLFFTILVLSYFRYMRIYRRYIYEPLHKPQRKRKK

SEQ ID NO: 40118 - protein, 48 aa, Artificial Sequence
  Quasi-synthetic sequence derived from human genome
RAGLVLRLLRALRVLYVMRLARHSLGLRSLGLTMRRCAREFGLLLLFL

SEQ ID NO: 40119 - protein, 48 aa, Artificial Sequence
  Quasi-synthetic sequence derived from human genome
RSAAVFIQAWWRGMLVRRTLLHAALRAWIIQCWWRQVLEKLLAKRRRM

SEQ ID NO: 40120 - protein, 48 aa, Artificial Sequence
  Quasi-synthetic sequence derived from human genome
LLKKRAAFTKLRRAAILRRERQQKAPRHPLADILHRGCPLLRRWLCRR

SEQ ID NO: 40121 - protein, 48 aa, Artificial Sequence
  Quasi-synthetic sequence derived from human genome
IYILVCLFFVFLSLLEYVYINYLFYSRGPRRQPRRHRRPRRVIARYRY

SEQ ID NO: 40122 - protein, 48 aa, Artificial Sequence
  Quasi-synthetic sequence derived from human genome
MRRLRRLAHLVLFCPFSKRLQGRLPGLRVRCIFLAWLGVFAGSWLVYV

SEQ ID NO: 40123 - protein, 48 aa, Artificial Sequence
  Quasi-synthetic sequence derived from human genome
RVRFLNLKKTIIKFQAHVRKHQQRQKYKKMKKAAVIIQTHFRAYIFAM

SEQ ID NO: 40124 - protein, 48 aa, Artificial Sequence
  Quasi-synthetic sequence derived from human genome
RALALFVITCLVIFVLVHSFLKKLLGKKLTRCLKPFENSRLRLWTKWV

SEQ ID NO: 40125 - protein, 48 aa, Artificial Sequence
  Quasi-synthetic sequence derived from human genome
WLKKCYQMIDRRLRKNLKSLIIVHPSWFIRTVLAISRPFISVKFINKI

SEQ ID NO: 40126 - protein, 48 aa, Artificial Sequence
  Quasi-synthetic sequence derived from human genome
GVLLRRVTRNLVRNKLAVITRLLQNLIMGLFLLFFVLRVRSNVLKGAI

SEQ ID NO: 40127 - protein, 48 aa, Artificial Sequence
  Quasi-synthetic sequence derived from human genome
WRHFHTLRMTIFCLVLPLLVMAICYTGIIKTLLRCPSKKKYKAIRLIF

SEQ ID NO: 40128 - protein, 48 aa, Artificial Sequence
  Quasi-synthetic sequence derived from human genome
KILCHKFMRFMMMRAENFFILRRKPVEQKKIFTIQGCYPVIRCLLRRR

SEQ ID NO: 40129 - protein, 48 aa, Artificial Sequence
  Quasi-synthetic sequence derived from human genome
FLLLVPLLVLALASYRRLCLRLRLADCLVPYSRALYRRRRAPQPRQIR

SEQ ID NO: 40130 - protein, 48 aa, Artificial Sequence
  Quasi-synthetic sequence derived from human genome
ARLFRIKCVTRIQAYWRGCVVRKWYRNLRKTVPPTDAKLRKKFFEKKF

SEQ ID NO: 40131 - protein, 48 aa, Artificial Sequence
  Quasi-synthetic sequence derived from human genome
KLHWWRFLVIWILFSAVTAFVTFRATRKPLVQTTPRLVYKWFLLIYKI

SEQ ID NO: 40132 - protein, 48 aa, Artificial Sequence
  Quasi-synthetic sequence derived from human genome
RQRRQKLLLAQLHHRKRVKAAGQIQAWWRGVLVRRTLLVAALRAWMIQ

SEQ ID NO: 40133 - protein, 48 aa, Artificial Sequence
  Quasi-synthetic sequence derived from human genome
FAILRIIRLVRVFRIFKLSRHSKGLQILGHTLRASMRELGLLIFFLFI

SEQ ID NO: 40134 - protein, 48 aa, Artificial Sequence
  Quasi-synthetic sequence derived from human genome
PCKTMKFIVWRRFKWVIIGLLFLLILLLFVAVLLYSLPNYLSMKIVKP

SEQ ID NO: 40135 - protein, 48 aa, Artificial Sequence
  Quasi-synthetic sequence derived from human genome
RRRCCRLCIWLLQTLVHLLQLGQVWRYLRALYLGLQSRWRGERLRRHF

SEQ ID NO: 40136 - protein, 48 aa, Artificial Sequence
  Quasi-synthetic sequence derived from human genome
SLIQAMWRRYRAKKYLCKVKAACKIQAWYRCWRAHKEYLAILKAVKII

SEQ ID NO: 40137 - protein, 48 aa, Artificial Sequence
  Quasi-synthetic sequence derived from human genome
RIHLKLHFTCQRILFLKPSCMLEVITWPIQAFVKRKVIIFLKKCLLCK

SEQ ID NO: 40138 - protein, 48 aa, Artificial Sequence
  Quasi-synthetic sequence derived from human genome
RRKMPSLGWLRKCYQQIDRRLRKNLKSLIIVHPSWFIRTLLAVTRPFI

SEQ ID NO: 40139 - protein, 48 aa, Artificial Sequence
  Quasi-synthetic sequence derived from human genome
VLWHWLLRTGGWKVSAVTLAYLIFCLCSLVGILHLQRALVLRRKRKRM

SEQ ID NO: 40140 - protein, 48 aa, Artificial Sequence
  Quasi-synthetic sequence derived from human genome
RWEGSAPRRLLLALHRRLRGLRRAAAGTSRLLFQRLLPCGVIKFRYIW

SEQ ID NO: 40141 - protein, 48 aa, Artificial Sequence
  Quasi-synthetic sequence derived from human genome
IASLIFSAILKSLQSYFSPTLFRVIRLARIGRILRLIRAAKGIRTLLF

SEQ ID NO: 40142 - protein, 48 aa, Artificial Sequence
  Quasi-synthetic sequence derived from human genome
IRANYWLKLVKGILPLVGMAMVPALLGLIGYHLYRKANRPKVSKKKLK

SEQ ID NO: 40143 - protein, 48 aa, Artificial Sequence
  Quasi-synthetic sequence derived from human genome
RPGAWRRDIFGRIIWHKFKQWVIPWHLNKRYNRKRFFALPYVDHFLRL

SEQ ID NO: 40144 - protein, 48 aa, Artificial Sequence
  Quasi-synthetic sequence derived from human genome
NKFLSLANKRLPVKRAAVQFLNNAWGIQKKQNAKRFKRRWMVRKMKTK

SEQ ID NO: 40145 - protein, 48 aa, Artificial Sequence
  Quasi-synthetic sequence derived from human genome
KAAPGPKAALAVIRGGATRAAGVFYPWRFRLLCLLRRWLPRPRAWFIR

SEQ ID NO: 40146 - protein, 48 aa, Artificial Sequence
  Quasi-synthetic sequence derived from human genome
VLRALRLLRIFKVTKYWSSLRNLVVSLLNSMKSIISLLFLLFLFIVVF

SEQ ID NO: 40147 - protein, 48 aa, Artificial Sequence
  Quasi-synthetic sequence derived from human genome
RRPRPRRELSLGRKKAPHRLCGRFSRISMKLPRIPLRRQKLPKVVVAH

SEQ ID NO: 40148 - protein, 48 aa, Artificial Sequence
  Quasi-synthetic sequence derived from human genome
KYWRRVLAQRKLLMLKKEKLEKVQNKAASLIQGYWRRYSTRQRFLKLK

SEQ ID NO: 40149 - protein, 48 aa, Artificial Sequence
  Quasi-synthetic sequence derived from human genome
LAILRIIRLVRVFRIFKLSRHSKGLQILGQTLKASMRELGLLIFFLFI

SEQ ID NO: 40150 - protein, 48 aa, Artificial Sequence
  Quasi-synthetic sequence derived from human genome
RRASRGPIAFWARRASRTRLAAWARRALLSLRSPKARRGKARRRAAKL

SEQ ID NO: 40151 - protein, 48 aa, Artificial Sequence
  Quasi-synthetic sequence derived from human genome
KIVWSLRRRQQLARQARMKKATRFIMVVAIVFITCYLPSVSARLYFLW

SEQ ID NO: 40152 - protein, 48 aa, Artificial Sequence
  Quasi-synthetic sequence derived from human genome
LIKPFGARKKRSWYLTWKYKLTNQRALRRFCQTGAVLFLLVTVIVNIK

SEQ ID NO: 40153 - protein, 48 aa, Artificial Sequence
  Quasi-synthetic sequence derived from human genome
KLKLNVLTIILLPVHLLITIYSALIFIPWYFLTNAKKKNAMAKRIKAK

SEQ ID NO: 40154 - protein, 48 aa, Artificial Sequence
  Quasi-synthetic sequence derived from human genome
ALRWVRLLGFAIVYGTIILKLYRVLQLFLSRTAQRSALLSSGRLLRRL

SEQ ID NO: 40155 - protein, 48 aa, Artificial Sequence
  Quasi-synthetic sequence derived from human genome
MNVRMPFRRKIYYLPRRYKFMSRIDKQISRFRRWLPKKPMRLDKETLP

SEQ ID NO: 40156 - protein, 48 aa, Artificial Sequence
  Quasi-synthetic sequence derived from human genome
KYHRFLGRHFPRFYVLYTIFMKGLQMLWADAKKARRIKTNMWKHNIKF

SEQ ID NO: 40157 - protein, 48 aa, Artificial Sequence
  Quasi-synthetic sequence derived from human genome
LKLTCSAFRLQRALRFLLGRLPWRVASGARRFRRWLNRYSYTVLSSWP

SEQ ID NO: 40158 - protein, 48 aa, Artificial Sequence
  Quasi-synthetic sequence derived from human genome
ILMTILINFLIFIRILGILLSKLRTRQMRCRDYRLRLARSTLTLVPLL

SEQ ID NO: 40159 - protein, 48 aa, Artificial Sequence
  Quasi-synthetic sequence derived from human genome
RKSQILISSWFRGNMQKKCYGKIKASVLLIQAFVRGWKARKNYRKYFR

SEQ ID NO: 40160 - protein, 48 aa, Artificial Sequence
  Quasi-synthetic sequence derived from human genome
WLARLLRSRAGSRKRPLTLLQRAGLLLLLGLLGFLALLALMSRLGRAA

SEQ ID NO: 40161 - protein, 48 aa, Artificial Sequence
  Quasi-synthetic sequence derived from human genome
VTRISILLRDLPTLKAAVIVAFAFTTLLIACLLLRVFRSGKRLKKTRK

SEQ ID NO: 40162 - protein, 48 aa, Artificial Sequence
  Quasi-synthetic sequence derived from human genome
FLRLFRAARLIKLLRQGYTIRILLWTFVQSFKALPYVCLLIAMLFFIY

SEQ ID NO: 40163 - protein, 48 aa, Artificial Sequence
  Quasi-synthetic sequence derived from human genome
RLRFLFNELRPAVCNDLSIMSKFKLLSSLPRWRRIAQKIIRERRKKRV

SEQ ID NO: 40164 - protein, 48 aa, Artificial Sequence
  Quasi-synthetic sequence derived from human genome
LLLLLVVCGIGCVWHWKHRVATRFTLPRFLQRRSSRRKVCTKTFLGPR

SEQ ID NO: 40165 - protein, 48 aa, Artificial Sequence
  Quasi-synthetic sequence derived from human genome
ILKRALKVKQAMMQLYVLKLLKVQTKYLGRQWRKSNMKTMSAIYQKVR

SEQ ID NO: 40166 - protein, 48 aa, Artificial Sequence
  Quasi-synthetic sequence derived from human genome
LAILRVIRLVRVFRIFKLSRHSKGLQILGQTLRASMRELGLLIFFLFI

SEQ ID NO: 40167 - protein, 48 aa, Artificial Sequence
  Quasi-synthetic sequence derived from human genome
RRMIDYRHFVPQMPFVPAVAKSIPRKRISLKRPKKCFRNLFHIRRNKT

SEQ ID NO: 40168 - protein, 48 aa, Artificial Sequence
  Quasi-synthetic sequence derived from human genome
LKKTAILIQRKYRAHLCTKHHLQFLQVQNAVIKIQSSYRRWMIRKRMR

SEQ ID NO: 40169 - protein, 48 aa, Artificial Sequence
  Quasi-synthetic sequence derived from human genome
KLLKRLRLLPALLILRAFKPHRKIRDYRVVVVGTAGVGKSTLLHKWAS

SEQ ID NO: 40170 - protein, 48 aa, Artificial Sequence
  Quasi-synthetic sequence derived from human genome
FLKLFRAARLIKLLRQGYTIRILLWTFVQSFKALPYVCLLIAMLFFIY

SEQ ID NO: 40171 - protein, 48 aa, Artificial Sequence
  Quasi-synthetic sequence derived from human genome
VAVVVTAVLILLVVRRLRVPKTPAPDGPRYRFRKRDKVLFYGRKIMRK

SEQ ID NO: 40172 - protein, 48 aa, Artificial Sequence
  Quasi-synthetic sequence derived from human genome
AVVVTAVLILLVVRRLRVPKTPAPDGPRYRFRKRDKVLFYGRKIMRKV

SEQ ID NO: 40173 - protein, 48 aa, Artificial Sequence
  Quasi-synthetic sequence derived from human genome
IPKRKRKAKKRRKNDVVVVKGKLKLCSISGLIALCGILVLLVGIAMAV

SEQ ID NO: 40174 - protein, 48 aa, Artificial Sequence
  Quasi-synthetic sequence derived from human genome
RGMLPVAVLVALLAVIVLVALLLLWRRRQKRRTGALVLSRGGKRNGVV

SEQ ID NO: 40175 - protein, 48 aa, Artificial Sequence
  Quasi-synthetic sequence derived from human genome
RLWGRRKCKPQMNYDKLSRALRYYYNKRILHKTKGKRFTYKFNFSKLI

SEQ ID NO: 40176 - protein, 48 aa, Artificial Sequence
  Quasi-synthetic sequence derived from human genome
NLTFTLFKCLLLTGGCTLLHCFVILPVFLTFFPPSKKHHKKKKRAKRK

SEQ ID NO: 40177 - protein, 48 aa, Artificial Sequence
  Quasi-synthetic sequence derived from human genome
RGYLARKAFAKKQQQLSALKVLQRNCAAYLKLRHWQWWRVFTKVKPLL

SEQ ID NO: 40178 - protein, 48 aa, Artificial Sequence
  Quasi-synthetic sequence derived from human genome
LAILRVIRLVRVFRIFKLSRHSKGLQILGQTLKASMRELGLLIFFLFI

SEQ ID NO: 40179 - protein, 48 aa, Artificial Sequence
  Quasi-synthetic sequence derived from human genome
LAILRVIRLVRVFRIFKLSRHSKGLQILGKTLQASMRELGLLIFFLFI

SEQ ID NO: 40180 - protein, 48 aa, Artificial Sequence
  Quasi-synthetic sequence derived from human genome
RTLFRSRSKRRHRTVKLIFAIVVAYFLSWGPYNFTLFLQTLFRTQIIR

SEQ ID NO: 40181 - protein, 48 aa, Artificial Sequence
  Quasi-synthetic sequence derived from human genome
IIIMYFIFTSMAGIRNIGIWFFWIRLYKIRRGRTRPQALLFLCMILLL

SEQ ID NO: 40182 - protein, 48 aa, Artificial Sequence
  Quasi-synthetic sequence derived from human genome
RMPEKVTWMRRMRILRRLLRRYRESKKIDRHMYHSLYLKVKGNVFKNK

SEQ ID NO: 40183 - protein, 48 aa, Artificial Sequence
  Quasi-synthetic sequence derived from human genome
QRPIGKAKPKKQSKKKVPFWNVQNKIILFTVFLFILAVIAWTLLWLYI

SEQ ID NO: 40184 - protein, 48 aa, Artificial Sequence
  Quasi-synthetic sequence derived from human genome
WKGKTLRRQLQRQHKCAIIIQSYYRMHVQQKKWKIMKKAALLIQKYYR

SEQ ID NO: 40185 - protein, 48 aa, Artificial Sequence
  Quasi-synthetic sequence derived from human genome
LPKCIRAKIQDYHILTRKRIRYRFRRFIQQFSQCKATARNLKLKYLIN

SEQ ID NO: 40186 - protein, 48 aa, Artificial Sequence
  Quasi-synthetic sequence derived from human genome
LIQGAIYAGIVIALLFLCLLPLIVKHIRKKQAKKAAAIRAKKSSKVRA

SEQ ID NO: 40187 - protein, 48 aa, Artificial Sequence
  Quasi-synthetic sequence derived from human genome
ILFYQKVIKYIWRIGTDGRTVRRTMNIVPRTKVKTIKMFLILNLLFLL

SEQ ID NO: 40188 - protein, 48 aa, Artificial Sequence
  Quasi-synthetic sequence derived from human genome
RIIWSLRQRQMDRHAKIKRAITFIMVVAIVFVICFLPSVVVRIRIFWL

SEQ ID NO: 40189 - protein, 48 aa, Artificial Sequence
  Quasi-synthetic sequence derived from human genome
RSKKAVWHKLLSKQRKRAVVACFRMAPLYNLPRHRSINLFLHGYQRFW

SEQ ID NO: 40190 - protein, 48 aa, Artificial Sequence
  Quasi-synthetic sequence derived from human genome
RGYLARKAFAKRQQQLTAMKVLQRNCAAYLKLRNWQWWRLFTKVKPLL

SEQ ID NO: 40191 - protein, 48 aa, Artificial Sequence
  Quasi-synthetic sequence derived from human genome
AMKGKKPSFMVIRFPGRRGYGRLRPRARSLSKASTAINWLTKKFLLKK

SEQ ID NO: 40192 - protein, 48 aa, Artificial Sequence
  Quasi-synthetic sequence derived from human genome
KAGKAFLRLKRKFIQMRRPFLERRDLIIQHIPGFWVKAFLNHPRISIL

SEQ ID NO: 40193 - protein, 48 aa, Artificial Sequence
  Quasi-synthetic sequence derived from human genome
VSQRKQIKRKAPRGFLKRVFKRKKPQLRLEKSGDLLVHLNCLLFVHRL

SEQ ID NO: 40194 - protein, 48 aa, Artificial Sequence
  Quasi-synthetic sequence derived from human genome
WRRRHWAVKMVTCFIIGLLFPVFSVCYLIAPKSPLGLFIRKPFIKFIC

SEQ ID NO: 40195 - protein, 48 aa, Artificial Sequence
  Quasi-synthetic sequence derived from human genome
RSNAPNIPKLNRFLLLFIGFVCVLLSFFMARVFMRMKLPRSLALLPRL

SEQ ID NO: 40196 - protein, 48 aa, Artificial Sequence
  Quasi-synthetic sequence derived from human genome
KRCIVLVTELMTSGTLKTYLKRFKVMKPKVLRSWCRQILKGLLFLHTR

SEQ ID NO: 40197 - protein, 48 aa, Artificial Sequence
  Quasi-synthetic sequence derived from human genome
RRGRRRTRAAGSLLSRAAILLFISAFLVRVPSSVGHLVRLPRAFRLTK

SEQ ID NO: 40198 - protein, 48 aa, Artificial Sequence
  Quasi-synthetic sequence derived from human genome
WLIFLLIILSYIKIGKNLLRISKRRSKFPNSGKYATTARNSFIVLIIF

SEQ ID NO: 40199 - protein, 48 aa, Artificial Sequence
  Quasi-synthetic sequence derived from human genome
FQARCRAYLVRKAFRHRLWAVLTVQAYARGMIARRLHQRLRAEYLWRL

SEQ ID NO: 40200 - protein, 48 aa, Artificial Sequence
  Quasi-synthetic sequence derived from human genome
HRPLLLQKLLKDGGVLSPILTRLMNFFVFSRGLLQYINQRKKFRRRWV

SEQ ID NO: 40201 - protein, 48 aa, Artificial Sequence
  Quasi-synthetic sequence derived from human genome
TFNKFWRRYGKLSRHLMKVKLKKYTKFLFVRDPFVRLISAFRSKFELE

SEQ ID NO: 40202 - protein, 48 aa, Artificial Sequence
  Quasi-synthetic sequence derived from human genome
IRILAVITIQAGVRGYLARRRIRLWHRGAMVIQATWRGYRVRRNLAHL

SEQ ID NO: 40203 - protein, 48 aa, Artificial Sequence
  Quasi-synthetic sequence derived from human genome
RGYLARKAFAKRQQQLTAMKVIQRNCAAYLKLRNWQWWRLFTKVKPLL

SEQ ID NO: 40204 - protein, 48 aa, Artificial Sequence
  Quasi-synthetic sequence derived from human genome
WKLFQALKLNLFGLVLPLLVMIICYTGIIKILLRRPNEKKSKAVRLIF

SEQ ID NO: 40205 - protein, 48 aa, Artificial Sequence
  Quasi-synthetic sequence derived from human genome
WFLNPLKSARYFLWHTYRWLLLKLLLLLLLLLLLALFLYSVPGYLVKK

SEQ ID NO: 40206 - protein, 48 aa, Artificial Sequence
  Quasi-synthetic sequence derived from human genome
VLRTFRLLRVLKLVRFMPALRRQLVVLMKTMDNVATFCMLLMLFIFIF

SEQ ID NO: 40207 - protein, 48 aa, Artificial Sequence
  Quasi-synthetic sequence derived from human genome
FIQKRKFQEIKNSTIKIQAMWRRYRAKKYLCKVKAACKIQAWYRCWRA

SEQ ID NO: 40208 - protein, 48 aa, Artificial Sequence
  Quasi-synthetic sequence derived from human genome
RLARIGRILRLIRAAKGIRTLLFALMMSLPALFNIGLLLFLVMFIYSI

SEQ ID NO: 40209 - protein, 48 aa, Artificial Sequence
  Quasi-synthetic sequence derived from human genome
KAFKIRKHYLHLRATVVSIQRRYRKLTAVRTQAVICIQSYYRGFKVRK

SEQ ID NO: 40210 - protein, 48 aa, Artificial Sequence
  Quasi-synthetic sequence derived from human genome
VKGKKCIVLVTELMTSGTLKTYLKRFKVMKIKVLRSWCRQILKGLQFL

SEQ ID NO: 40211 - protein, 48 aa, Artificial Sequence
  Quasi-synthetic sequence derived from human genome
KQKMRQAWKSWLIYVVVRRTKLQMQTTALEFRQRIILRVWWSTWRQRL

SEQ ID NO: 40212 - protein, 48 aa, Artificial Sequence
  Quasi-synthetic sequence derived from human genome
RIRGTRMYQPLTEDEIRIFKRKKRIKRRALLFLSYILTHFIFLALLLI

SEQ ID NO: 40213 - protein, 48 aa, Artificial Sequence
  Quasi-synthetic sequence derived from human genome
RIRISRVCHRWKRLVDDRWLWRHVDLTLYTMRPKVMWHLLRRYMASRL

SEQ ID NO: 40214 - protein, 48 aa, Artificial Sequence
  Quasi-synthetic sequence derived from human genome
IAYVALVTLLIWVPVKVILHKKRYIYRKIKGWRPVLMMCVVLTTLPCL

SEQ ID NO: 40215 - protein, 48 aa, Artificial Sequence
  Quasi-synthetic sequence derived from human genome
ALFVYLNRKIVQVMRKQKTINRFLMRKRLLFPALVTLLISTLTFPPGF

SEQ ID NO: 40216 - protein, 48 aa, Artificial Sequence
  Quasi-synthetic sequence derived from human genome
RPKKRAKTITFSKNAVISKRGGKLCLLIRVANLRKSLLIGSHIYGKLL

SEQ ID NO: 40217 - protein, 48 aa, Artificial Sequence
  Quasi-synthetic sequence derived from human genome
RKFKFRKMHYDRFVIFLMPHIGCIVMALSKYLMMFQIYCKVCIPALKK

SEQ ID NO: 40218 - protein, 48 aa, Artificial Sequence
  Quasi-synthetic sequence derived from human genome
RGKMMQRRPRSAEVKYFYFFKILLRLRLAILKYLFIDDKGILFVSSRK

SEQ ID NO: 40219 - protein, 48 aa, Artificial Sequence
  Quasi-synthetic sequence derived from human genome
FWKNFQTLKIVILGLVLPLLVMVICYSGILKTLLRCRNEKKRHRAVRL

SEQ ID NO: 40220 - protein, 48 aa, Artificial Sequence
  Quasi-synthetic sequence derived from human genome
RLARAASRLAFQGWLRRGVLLVRAPPACLQVLRDAWRRRALRPPRGFR

SEQ ID NO: 40221 - protein, 48 aa, Artificial Sequence
  Quasi-synthetic sequence derived from human genome
RLWGRRKCKPQMNYDKLSRALRYYYNKRILHKTKGKRFTYKFNFNKLV

SEQ ID NO: 40222 - protein, 48 aa, Artificial Sequence
  Quasi-synthetic sequence derived from human genome
WFLNPLKSIKYLICTRYKWLIIKIVLALLGLLMLGLFLYSLPGYMVKK

SEQ ID NO: 40223 - protein, 48 aa, Artificial Sequence
  Quasi-synthetic sequence derived from human genome
KPGIKIFRFVAPLYYINKECFKSALYKQTVNPILIKVAWKKAAKRKIK

SEQ ID NO: 40224 - protein, 48 aa, Artificial Sequence
  Quasi-synthetic sequence derived from human genome
RLRPRLHFCLVLLLLLVVPAAWGCGPGRVVGSRRRPPRKLVPLAYKQF

SEQ ID NO: 40225 - protein, 48 aa, Artificial Sequence
  Quasi-synthetic sequence derived from human genome
FYRNKLKYLAFLRKRMNTNPSRGPYHFRAPSRIFWRTVRGMLPHKTKR

SEQ ID NO: 40226 - protein, 48 aa, Artificial Sequence
  Quasi-synthetic sequence derived from human genome
TWSLRRRPARTLGLLLLVVLGFLVLRRLDWSTLVPLRLRHRQLGLQAK

SEQ ID NO: 40227 - protein, 48 aa, Artificial Sequence
  Quasi-synthetic sequence derived from human genome
MKKLVPVRRRAWGQLCLPPQRLRVTRHPLIPAPVLGLLLLLLLSVLLL

SEQ ID NO: 40228 - protein, 48 aa, Artificial Sequence
  Quasi-synthetic sequence derived from human genome
VMFYGRKIMRKVTTLPNTLVENTALPRQRARKRTKVLSLAKRILRFKK

SEQ ID NO: 40229 - protein, 48 aa, Artificial Sequence
  Quasi-synthetic sequence derived from human genome
HKVFATTSIKSFFRQLNLYGFRKRRQCTFRTFTRIFSAKRLVSILNKL

SEQ ID NO: 40230 - protein, 48 aa, Artificial Sequence
  Quasi-synthetic sequence derived from human genome
WRRKHWVVKLLTCMTIGFLFPMLSIAYLISPRSNLGLFIKKPFIKFIC

SEQ ID NO: 40231 - protein, 48 aa, Artificial Sequence
  Quasi-synthetic sequence derived from human genome
RAGVTLRVLRMMRIFWVIKLARHFIGLQTLGLTLKRCYREMVMLLVFI

SEQ ID NO: 40232 - protein, 48 aa, Artificial Sequence
  Quasi-synthetic sequence derived from human genome
RRHFRMKLRNLFTKFIRKFGFELVKRLLPEEYHRVLVNIRKAEARAKR

SEQ ID NO: 40233 - protein, 48 aa, Artificial Sequence
  Quasi-synthetic sequence derived from human genome
KINRPRTELKKKLFKRRRVLNRERRLRHRVVGAVIDQGLITRHHLKKR

SEQ ID NO: 40234 - protein, 48 aa, Artificial Sequence
  Quasi-synthetic sequence derived from human genome
LRKVRAKETRKRALSRLKLKLNKDIVISVGIYNLVQKALKPPPIKLYR

SEQ ID NO: 40235 - protein, 48 aa, Artificial Sequence
  Quasi-synthetic sequence derived from human genome
KAAINLAKLKLFRHYYVLIVCYIYFTRIIAFLLKLAVPFQWKWLYQLL

SEQ ID NO: 40236 - protein, 48 aa, Artificial Sequence
  Quasi-synthetic sequence derived from human genome
AIFRLVQASGQKAPRPAARRKARRLLKTVLMILLAFLVCWGPLFGLLL

SEQ ID NO: 40237 - protein, 48 aa, Artificial Sequence
  Quasi-synthetic sequence derived from human genome
PFLNPFKKIKDHLLLIKKVTWTMNGLMLPTDIKRRKTKPVLSIRMKKL

SEQ ID NO: 40238 - protein, 48 aa, Artificial Sequence
  Quasi-synthetic sequence derived from human genome
FLFAFFIFIMSLLLISGQRPVNLTMRRKLRKHNCLQRRCMPLHSRVPF

SEQ ID NO: 40239 - protein, 48 aa, Artificial Sequence
  Quasi-synthetic sequence derived from human genome
RRKHAVAVIWAYWLGLKVRREYRKFFRANAGKKIYEFTLQRIVQKYFL

SEQ ID NO: 40240 - protein, 48 aa, Artificial Sequence
  Quasi-synthetic sequence derived from human genome
LRYSFLKTASFFVRLGPMALAFKVRGLLDCKHSWKRLKDIRKIFPGKK

SEQ ID NO: 40241 - protein, 48 aa, Artificial Sequence
  Quasi-synthetic sequence derived from human genome
LRLQIIQRERRRKELFRKKNKAAAVIQRAWRSYQLRKHLSHLRHMKQL

SEQ ID NO: 40242 - protein, 48 aa, Artificial Sequence
  Quasi-synthetic sequence derived from human genome
AWWRGTLVRRALLHAALSACIIQCWWRLILSKILKKRRQAALEAFSRK

SEQ ID NO: 40243 - protein, 48 aa, Artificial Sequence
  Quasi-synthetic sequence derived from human genome
AAFAGKLLSVFRQPLSSLWRSLVPLFCWLRATFWLLATKRRKQQLVLR

SEQ ID NO: 40244 - protein, 48 aa, Artificial Sequence
  Quasi-synthetic sequence derived from human genome
RFLLRVRCWQYRQLSALHRAPRPTRPDKARRLGYKAKQGYVIYRIRVR

SEQ ID NO: 40245 - protein, 48 aa, Artificial Sequence
  Quasi-synthetic sequence derived from human genome
RKIFQCNKHMKVFHKYSNRNKVRHTKKKTFKCIKCSKSFFMLSCLIRH

SEQ ID NO: 40246 - protein, 48 aa, Artificial Sequence
  Quasi-synthetic sequence derived from human genome
LVWKRRILFFVVTLVSVFLVWKFTYAHKYLLADNRHYTFYVWKRVFQR

SEQ ID NO: 40247 - protein, 48 aa, Artificial Sequence
  Quasi-synthetic sequence derived from human genome
KLDLKAKKAQLMQYLSLPKTPKMLKMSKGLDARSKRWLKIIWRRHGIW

SEQ ID NO: 40248 - protein, 48 aa, Artificial Sequence
  Quasi-synthetic sequence derived from human genome
HLRRIRAAVVLQKHYRMQRARQAYQRVRRAAVVIQAFTRAMFVRRTYR

SEQ ID NO: 40249 - protein, 48 aa, Artificial Sequence
  Quasi-synthetic sequence derived from human genome
RRALLRAVFVLRQGLACLQRLHVAWFYIHGVFYHLAKRLTGITYLRVR

SEQ ID NO: 40250 - protein, 48 aa, Artificial Sequence
  Quasi-synthetic sequence derived from human genome
LKGKKCIVLVTELMTSGTLKTYLKRFKVMKPKVLRSWCRQILKGLQFL

SEQ ID NO: 40251 - protein, 48 aa, Artificial Sequence
  Quasi-synthetic sequence derived from human genome
LKRNMMPWALQKKREIHMAKAHRRRAARSALPMRLTSCIFRRPVTRIR

SEQ ID NO: 40252 - protein, 48 aa, Artificial Sequence
  Quasi-synthetic sequence derived from human genome
NDPRFIGNWWSGFLLCAIAMFLVIFPMFTFPKKLPPRHKKKKKKKFSV

SEQ ID NO: 40253 - protein, 48 aa, Artificial Sequence
  Quasi-synthetic sequence derived from human genome
RQWRAVMLIQAAIRSWLTRKHIQRLHAAATVIKRAWQKWRIRMACLAA

SEQ ID NO: 40254 - protein, 48 aa, Artificial Sequence
  Quasi-synthetic sequence derived from human genome
KVFLSSLKFHIRRFIFLFFILVIGIYPSGHSLILILGNPKLKQNAKKF

SEQ ID NO: 40255 - protein, 48 aa, Artificial Sequence
  Quasi-synthetic sequence derived from human genome
VALLLVVVTWRVCQKSHCFRLGRQLSKALQVNCVVRKLLVQLRRLYWW

SEQ ID NO: 40256 - protein, 48 aa, Artificial Sequence
  Quasi-synthetic sequence derived from human genome
FGGFKKFYFHQHLCILKAKLGRPVTWNRQLRHFQGRKKALQIQKTWIK

SEQ ID NO: 40257 - protein, 48 aa, Artificial Sequence
  Quasi-synthetic sequence derived from human genome
LDFQRALALFVLTCVVLTFLGHRLLKRLLGPKLRRFLKPQGHPRLLLW

SEQ ID NO: 40258 - protein, 48 aa, Artificial Sequence
  Quasi-synthetic sequence derived from human genome
TVNALLVLLALAAWASRWLRRKLRARRKGGAPVHVRHMYSTRRPLRSM

SEQ ID NO: 40259 - protein, 48 aa, Artificial Sequence
  Quasi-synthetic sequence derived from human genome
MKKCYQMIDRRLRKNLKSFIIVHPSWFIRTILAVTRPFISSKFSSKIK

SEQ ID NO: 40260 - protein, 48 aa, Artificial Sequence
  Quasi-synthetic sequence derived from human genome
ARKFVFFNIPQIQYKNPWVQIMMFKNMTPSPFLRFYLGKPSGKRRRRK

SEQ ID NO: 40261 - protein, 48 aa, Artificial Sequence
  Quasi-synthetic sequence derived from human genome
FGKLVFLPLRLVWKEVILRKILILVLVQKDVSLTTQYFLQKARSRRHR

SEQ ID NO: 40262 - protein, 48 aa, Artificial Sequence
  Quasi-synthetic sequence derived from human genome
TFFIVPSHRRKIFPGLILSDIKPAKRMKFKTVCYLLVQLMHCRKMFKA

SEQ ID NO: 40263 - protein, 48 aa, Artificial Sequence
  Quasi-synthetic sequence derived from human genome
LFIVLILVGYISVKVMLKSIKTRLGRRVPAAPPALRRNLLLQAWKCVC

SEQ ID NO: 40264 - protein, 48 aa, Artificial Sequence
  Quasi-synthetic sequence derived from human genome
GVLKRPARLPCSHIFCKKCILRWLARQKTCPCCRKEVKRKKVVHMNKL

SEQ ID NO: 40265 - protein, 48 aa, Artificial Sequence
  Quasi-synthetic sequence derived from human genome
LRKCYQQIDRRLRKNLKSLIIVHPSWFIRTLLAVTRPFISSKFSQKIR

SEQ ID NO: 40266 - protein, 48 aa, Artificial Sequence
  Quasi-synthetic sequence derived from human genome
WNKWIDIKQFVWYTPPTFMIAVFLPIVVLIFKSILFLPCLRKKILKIR

SEQ ID NO: 40267 - protein, 48 aa, Artificial Sequence
  Quasi-synthetic sequence derived from human genome
KVIRTGKRKKKAWKRMVTKVCFVGDGFTRKPPKYERFIRPMGLRFKKA

SEQ ID NO: 40268 - protein, 48 aa, Artificial Sequence
  Quasi-synthetic sequence derived from human genome
YPLRRAIVFTRQLVTYIVVGVTLRPAILVIPCLLLIKCHLKLYRTKLI

SEQ ID NO: 40269 - protein, 48 aa, Artificial Sequence
  Quasi-synthetic sequence derived from human genome
WIIQCWWRMTLSRVLEKKRQAALIAYATRERAVIKLQSLVRMWRVRWR

SEQ ID NO: 40270 - protein, 48 aa, Artificial Sequence
  Quasi-synthetic sequence derived from human genome
KILRVLRVLRPLRAINRAKGLKHVVQCVFVAIRTIGNIMIVTTLLQFM

SEQ ID NO: 40271 - protein, 48 aa, Artificial Sequence
  Quasi-synthetic sequence derived from human genome
KYKKFPHWLDKWMLTRKQFGLLSLFFAVLHAIYTLSYAMRRSYRYKLL

SEQ ID NO: 40272 - protein, 48 aa, Artificial Sequence
  Quasi-synthetic sequence derived from human genome
AFRVAKKRAPKVLGTTLVVGLLAGVGYFAFMLFRKRLGSMILAFRPRP

SEQ ID NO: 40273 - protein, 48 aa, Artificial Sequence
  Quasi-synthetic sequence derived from human genome
KNNRQKVSGILQRVLLLFRAAQCSFPVAQWYILQLRWARKVMQKIRMK

SEQ ID NO: 40274 - protein, 48 aa, Artificial Sequence
  Quasi-synthetic sequence derived from human genome
KILRVLRVLRPLRAINRAKGLKHVVQCVFVAIRTIGNIVIVTTLLQFM

SEQ ID NO: 40275 - protein, 48 aa, Artificial Sequence
  Quasi-synthetic sequence derived from human genome
LPRRRGRPSRRFLGKKYRKYYYKSPKPLLRPFLCRICGSRFLSHEDLR

SEQ ID NO: 40276 - protein, 48 aa, Artificial Sequence
  Quasi-synthetic sequence derived from human genome
KYKKFPHWLDKWMLTRKQFGLLSFFFAVLHAIYSLSYPMRRSYRYKLL

SEQ ID NO: 40277 - protein, 48 aa, Artificial Sequence
  Quasi-synthetic sequence derived from human genome
KRYNRKRFFALPYVDHFLRLEREKRARIKARKENLERKKAKILLKKFP

SEQ ID NO: 40278 - protein, 48 aa, Artificial Sequence
  Quasi-synthetic sequence derived from human genome
RLASHCLAYANSCLNPLVYALASRHFRARFRRLWPCGRRRRHRARRAL

SEQ ID NO: 40279 - protein, 48 aa, Artificial Sequence
  Quasi-synthetic sequence derived from human genome
RNLVLKNRSLKLQKMKYRPPKTKFFFTVIPQPIFLSPGITLTLPIVFR

SEQ ID NO: 40280 - protein, 48 aa, Artificial Sequence
  Quasi-synthetic sequence derived from human genome
LHREVVRKILLLQSWFRMVLERRHFLQMKRAAVTIQACWRSYRVRRAL

SEQ ID NO: 40281 - protein, 48 aa, Artificial Sequence
  Quasi-synthetic sequence derived from human genome
VRICSKLKAVLQKQGIWSEIHFILTNPRSLKHLCRLKIRKCMGRLHLR

SEQ ID NO: 40282 - protein, 48 aa, Artificial Sequence
  Quasi-synthetic sequence derived from human genome
ISKGKATGRKAPLWLRAKFQRLLFKLGCYIQKNCGKFLVVGLLIFGAF

SEQ ID NO: 40283 - protein, 48 aa, Artificial Sequence
  Quasi-synthetic sequence derived from human genome
RYLRVKLTVRYKRVTTHRRIWLALGLCWLVSFLVGLTPMFGWNMKLTS

SEQ ID NO: 40284 - protein, 48 aa, Artificial Sequence
  Quasi-synthetic sequence derived from human genome
GILRRKLYIHRVTLRKLLPGVQYVYRCGSAQGWSRRFRFRALKNGAHW

SEQ ID NO: 40285 - protein, 48 aa, Artificial Sequence
  Quasi-synthetic sequence derived from human genome
REGQGFHILIPTILGLFLLALLGLVVKRAVERRKALSRRARRLAVRMR

SEQ ID NO: 40286 - protein, 48 aa, Artificial Sequence
  Quasi-synthetic sequence derived from human genome
WLLLVLVLVLLVSPRGCRARRGLRGLLMAHSQRLLFRIGYSLYTRTWL

SEQ ID NO: 40287 - protein, 48 aa, Artificial Sequence
  Quasi-synthetic sequence derived from human genome
HRKTCSQRRRRAMRAFRMLLYSKSTSLTFHWKLWGRHRGRRRGLAHPK

SEQ ID NO: 40288 - protein, 48 aa, Artificial Sequence
  Quasi-synthetic sequence derived from human genome
MVWPALWELYRELGLFQGPALGLRNHLGRKLRRRKKKKAKRTTNWKII

SEQ ID NO: 40289 - protein, 48 aa, Artificial Sequence
  Quasi-synthetic sequence derived from human genome
RIIFPFGFKFNIAVGLILCISLVILTFQWRFYLSFRKLMRWILILVIA

SEQ ID NO: 40290 - protein, 48 aa, Artificial Sequence
  Quasi-synthetic sequence derived from human genome
KRLLGPKLRRFLKPQGHPRLLLWFKRGLALAAFLGLVLWLSLDTSQRP

SEQ ID NO: 40291 - protein, 48 aa, Artificial Sequence
  Quasi-synthetic sequence derived from human genome
AKLLFTPQHKMLRLRLPNLKMVRLRVSFSAVVFKAVSDICKILNIRRS

SEQ ID NO: 40292 - protein, 48 aa, Artificial Sequence
  Quasi-synthetic sequence derived from human genome
KYLKVFYKFLNSNRHTIRHTGKKCFKCKKCVKSFCIRLHKTQHKCVYI

SEQ ID NO: 40293 - protein, 48 aa, Artificial Sequence
  Quasi-synthetic sequence derived from human genome
ALVRGWLVRKRFLEQRAKIRLLHFTAAAYYHLNAVRIQRAYKLYLAVK

SEQ ID NO: 40294 - protein, 48 aa, Artificial Sequence
  Quasi-synthetic sequence derived from human genome
SHKTFRIKRFLAKKQKQNRPIPQWIRMKTGNKIRYNSKRRHWRRTKLG

SEQ ID NO: 40295 - protein, 48 aa, Artificial Sequence
  Quasi-synthetic sequence derived from human genome
IVLLCVMNLIILVNLIHLFIFRKSNFIFDKLHKVGIKTRRQWRRSQFC

SEQ ID NO: 40296 - protein, 48 aa, Artificial Sequence
  Quasi-synthetic sequence derived from human genome
GKLLVHSLNLLAKQGLRLLRGLRRRNVQKKVALAKKLLAKLRFLAEEP

SEQ ID NO: 40297 - protein, 48 aa, Artificial Sequence
  Quasi-synthetic sequence derived from human genome
AHKRMKVKKLPMILALHLKRFKYMDQLHRYTKLSYRVVFPLELRLFNT

SEQ ID NO: 40298 - protein, 48 aa, Artificial Sequence
  Quasi-synthetic sequence derived from human genome
RRRRRGRTDGRRFLLRRAVPGHLGLARARVERAWLAAGLLKVPLRTPW

SEQ ID NO: 40299 - protein, 48 aa, Artificial Sequence
  Quasi-synthetic sequence derived from human genome
VLRRIILLQRWFRVLLCRQHFLHLRQASVIIQRFWRNYLNQKQVRDAA

SEQ ID NO: 40300 - protein, 48 aa, Artificial Sequence
  Quasi-synthetic sequence derived from human genome
MPKGMWICQVCRPKKKGRKLLHEKAAQIKRRYAKPIGRPKNKLKQRLL

SEQ ID NO: 40301 - protein, 48 aa, Artificial Sequence
  Quasi-synthetic sequence derived from human genome
RGYLARRAFQKRQQQQSALRVMQRNCAAYLKLRHWQWWRLFTKVKPLL

SEQ ID NO: 40302 - protein, 48 aa, Artificial Sequence
  Quasi-synthetic sequence derived from human genome
LRKLKFSPIKYGYQPRRNFWPARLATRLLKLRYLILGSAVGGGYTAKK

SEQ ID NO: 40303 - protein, 48 aa, Artificial Sequence
  Quasi-synthetic sequence derived from human genome
MSKRRMSVGQQTWALLCKNCLKKWRMKRQTLLEWLFSFLLVLFLYLFF

SEQ ID NO: 40304 - protein, 48 aa, Artificial Sequence
  Quasi-synthetic sequence derived from human genome
PLCWGALAAQLALLGLGLLHALLLVLLLCRLRRLRARARARAAARLSL

SEQ ID NO: 40305 - protein, 48 aa, Artificial Sequence
  Quasi-synthetic sequence derived from human genome
FPARWSFRAYTSVLYFNPWMRIFIQAKRVKTKHLCYCLYRPRKYLYVT

SEQ ID NO: 40306 - protein, 48 aa, Artificial Sequence
  Quasi-synthetic sequence derived from human genome
VVVMKFFRWVRRAWQRIISWVFFWRQKIKPTISGHPDSKKHSLKKMEK

SEQ ID NO: 40307 - protein, 48 aa, Artificial Sequence
  Quasi-synthetic sequence derived from human genome
KVGQVLRVMRLMRIFRILKLARHSTGLRAFGFTLRQCYQQVGCLLLFI

SEQ ID NO: 40308 - protein, 48 aa, Artificial Sequence
  Quasi-synthetic sequence derived from human genome
RAALSIQKVLRGYRYRKEFLRQRRAAVTLQAWWRGYCNRRNFKLILVG

SEQ ID NO: 40309 - protein, 48 aa, Artificial Sequence
  Quasi-synthetic sequence derived from human genome
MRRHCRTLRQRSRRPKMRPARRRGGRRQLLLRALDAVATCWEKLFALR

SEQ ID NO: 40310 - protein, 48 aa, Artificial Sequence
  Quasi-synthetic sequence derived from human genome
RTFRLLRVLKLVRFLPALRRQLVVLVKTMDNVATFCTLLMLFIFIFSI

SEQ ID NO: 40311 - protein, 48 aa, Artificial Sequence
  Quasi-synthetic sequence derived from human genome
KVGLVLRVLRALRILYVMRLARHSLGLQTLGLTVRRCTREFGLLLLFL

SEQ ID NO: 40312 - protein, 48 aa, Artificial Sequence
  Quasi-synthetic sequence derived from human genome
LGKKVLNLLKGAFPARLKKVLIVGAPIWFRVPYSIISLLLKDKVRERI

SEQ ID NO: 40313 - protein, 48 aa, Artificial Sequence
  Quasi-synthetic sequence derived from human genome
LGFLRVVRFVRILRIFKLTRHFVGLRVLGHTLRASTNEFLLLIIFLAL

SEQ ID NO: 40314 - protein, 48 aa, Artificial Sequence
  Quasi-synthetic sequence derived from human genome
LLVICLCYLLIVVKVRSAGRRVWAPSCQRRRRSERRVTRMVVAVVALF

SEQ ID NO: 40315 - protein, 48 aa, Artificial Sequence
  Quasi-synthetic sequence derived from human genome
WYYSLSQIKFSPVAKKLFVVTAVSAISVIFLAHHFKRKRGKKKGKILP

SEQ ID NO: 40316 - protein, 48 aa, Artificial Sequence
  Quasi-synthetic sequence derived from human genome
WLNNLPAKASRSKTRLKSQLLLQKYIAQRKWKKHFYVVTAANRLRKFP

SEQ ID NO: 40317 - protein, 48 aa, Artificial Sequence
  Quasi-synthetic sequence derived from human genome
RLRHPRTRWKNWWVRGILTLAMIAFFFIIIYLGPMVLMIIVMCVQIKC

SEQ ID NO: 40318 - protein, 48 aa, Artificial Sequence
  Quasi-synthetic sequence derived from human genome
RRNKRIWASGVVLLETVLFGFLLLYFPVFILYFKPSVFRCIALRWVRL

SEQ ID NO: 40319 - protein, 48 aa, Artificial Sequence
  Quasi-synthetic sequence derived from human genome
RRKEILAKYPAIKALMRPDPRLKWAVLVLVLVQMLACWLVRGLAWRWL

SEQ ID NO: 40320 - protein, 48 aa, Artificial Sequence
  Quasi-synthetic sequence derived from human genome
AQKRMRVKKLPMILALHLKRFKYMEQLHRYTKLSYRVVFPLELRLFNT

SEQ ID NO: 40321 - protein, 48 aa, Artificial Sequence
  Quasi-synthetic sequence derived from human genome
VKPKIPKGVSRKLDRLAYIAHPKLGKRARARIAKGLRLCRPKAKAKAK

SEQ ID NO: 40322 - protein, 48 aa, Artificial Sequence
  Quasi-synthetic sequence derived from human genome
GKIPSRFKRSYNYKTIVKKILAKLKRARSKKLDNFQSEKKVFKKSFLR

SEQ ID NO: 40323 - protein, 48 aa, Artificial Sequence
  Quasi-synthetic sequence derived from human genome
HCPICLRPPRPGLRRQWKCVQRRCLRHLAHRLRRRHQRCQRRTPLAVA

SEQ ID NO: 40324 - protein, 48 aa, Artificial Sequence
  Quasi-synthetic sequence derived from human genome
LAFRKAKIRDRVSKLLASVILLPWPPKVLGLKNVTGRLLVGLRWWNQI

SEQ ID NO: 40325 - protein, 48 aa, Artificial Sequence
  Quasi-synthetic sequence derived from human genome
MALLKVKFDQKKRVKLAQGLWLMNWFSVLAGIIIFSLGLFLKIELRKR

SEQ ID NO: 40326 - protein, 48 aa, Artificial Sequence
  Quasi-synthetic sequence derived from human genome
RMKHLKTLPMVPFKTKDSPGVFSKLGVLLRRVTRNLVRNKLAVITRLL

SEQ ID NO: 40327 - protein, 48 aa, Artificial Sequence
  Quasi-synthetic sequence derived from human genome
FWIVFLLLIVFYTAITKKIFKSHLKSSRNSTSVKKKSSRNIFSIVFVF

SEQ ID NO: 40328 - protein, 48 aa, Artificial Sequence
  Quasi-synthetic sequence derived from human genome
LLVQIPIFFFTVVVMLITYTKILQALNIRIGTRFSTGQKKKARKKKTI

SEQ ID NO: 40329 - protein, 48 aa, Artificial Sequence
  Quasi-synthetic sequence derived from human genome
LVTILCLLAAGFVVYLKRKTLIRLLFTNKKTTIEKLRCVRPSRPPRGF

SEQ ID NO: 40330 - protein, 48 aa, Artificial Sequence
  Quasi-synthetic sequence derived from human genome
LVLLVSLGVAIHLCCRRRRARLRFMKQKFNIVCLKISGFTTCCCFQIL

SEQ ID NO: 40331 - protein, 48 aa, Artificial Sequence
  Quasi-synthetic sequence derived from human genome
SPPGGPVPLSVLILSLLVLFFSAVFVAAGLFAYVLRRRRKKLPFRSKR

SEQ ID NO: 40332 - protein, 48 aa, Artificial Sequence
  Quasi-synthetic sequence derived from human genome
VQRPKGYRKLLALGTWLLALLLTLPVMLAMRLVRRGPKSLCLPAWGPR

SEQ ID NO: 40333 - protein, 48 aa, Artificial Sequence
  Quasi-synthetic sequence derived from human genome
KWWRSFLGRKQYQLTVQVAYYTMMMNLYNAMAVRIQRRWRGYRVRKYL

SEQ ID NO: 40334 - protein, 48 aa, Artificial Sequence
  Quasi-synthetic sequence derived from human genome
RNILGLVLPLLIMVICYSGILKTLLRCRNEKKRHRAVRVIFTIMIVYF

SEQ ID NO: 40335 - protein, 48 aa, Artificial Sequence
  Quasi-synthetic sequence derived from human genome
LAKRQRLPSVENRPKIAAFLPARQLWKWFGKPTQRRGMKGKARKLFYK

SEQ ID NO: 40336 - protein, 48 aa, Artificial Sequence
  Quasi-synthetic sequence derived from human genome
LLPLHRPSWATWLDFLILKVAVGTRLHRVPVKIKRMCVNGLCRARKHR

SEQ ID NO: 40337 - protein, 48 aa, Artificial Sequence
  Quasi-synthetic sequence derived from human genome
FGRTAKPAHIAKVKMKFRFLGKLMAKAIMDFRLVDLPLGLPFYKWMLR

SEQ ID NO: 40338 - protein, 48 aa, Artificial Sequence
  Quasi-synthetic sequence derived from human genome
RARVSYRLLGVISLLHLVLSMGLQLYGFRQRQRARKEWRLHRGLSHRR

SEQ ID NO: 40339 - protein, 48 aa, Artificial Sequence
  Quasi-synthetic sequence derived from human genome
LITKELYRSYVRTRGVGKVPRKKVNVKVFIIIAVFFICFVPFHFARIP

SEQ ID NO: 40340 - protein, 48 aa, Artificial Sequence
  Quasi-synthetic sequence derived from human genome
IQISKDGLPGRVPLWVILLSAFAGLLLLMLLILALWKIGFFKRPLKKK

SEQ ID NO: 40341 - protein, 48 aa, Artificial Sequence
  Quasi-synthetic sequence derived from human genome
ICRVLRSLKLLAQFRQIQIIILVLVRALKSMTFLLMLLLIFFYIFAVT

SEQ ID NO: 40342 - protein, 48 aa, Artificial Sequence
  Quasi-synthetic sequence derived from human genome
LSRGRRRRMHVLRRRWDLGSLCRALLTRGLAALGHSLKHVLGAIFSKI

SEQ ID NO: 40343 - protein, 48 aa, Artificial Sequence
  Quasi-synthetic sequence derived from human genome
IAFDRFLKIIRPLRNIFLKKPVFAKTVSIFIWFFLFFISLPNTILSNK

SEQ ID NO: 40344 - protein, 48 aa, Artificial Sequence
  Quasi-synthetic sequence derived from human genome
RAAKWLHFPQLALRRRLGQLSCMSRPALKLRSWPLTVLYYLLPFGALR

SEQ ID NO: 40345 - protein, 48 aa, Artificial Sequence
  Quasi-synthetic sequence derived from human genome
GRKAPLWLRAKFQRLLFKLGCYIQKNCGKFLVVGLLIFGAFAVGLKAA

SEQ ID NO: 40346 - protein, 48 aa, Artificial Sequence
  Quasi-synthetic sequence derived from human genome
RRRGFGLFFFLRLHRLLLLFLVLRGTLANKLNVPQVLLPFGREPGRVP

SEQ ID NO: 40347 - protein, 48 aa, Artificial Sequence
  Quasi-synthetic sequence derived from human genome
ILRSHLIKATVIPNRVKMLPYFGIIRNRMMSTHKSKKKIREYYRLLNV

SEQ ID NO: 40348 - protein, 48 aa, Artificial Sequence
  Quasi-synthetic sequence derived from human genome
MALSTIVSQRKQIKRKAPRGFLKRVFKRKKPQLRLEKSGDLLVRFHPF

SEQ ID NO: 40349 - protein, 48 aa, Artificial Sequence
  Quasi-synthetic sequence derived from human genome
KLWSFFIYLLRRQIRTVIQYQTVRYDILPLSPVSRNRLAQVKRKILVL

SEQ ID NO: 40350 - protein, 48 aa, Artificial Sequence
  Quasi-synthetic sequence derived from human genome
KATGKLYACKKLNKKRLKKRKGYQGAMVEKKILMKVHSRFIVSLAYAF

SEQ ID NO: 40351 - protein, 48 aa, Artificial Sequence
  Quasi-synthetic sequence derived from human genome
LVKRARLVRVHAYIISYLKKEMPSVFGKENKKKQLILKLPVIFAKIQL

SEQ ID NO: 40352 - protein, 48 aa, Artificial Sequence
  Quasi-synthetic sequence derived from human genome
FFAPLLVICLCYLLIVVKVRAAGVRVGCVRRRSERKVTRMVLVVVLVF

SEQ ID NO: 40353 - protein, 48 aa, Artificial Sequence
  Quasi-synthetic sequence derived from human genome
ISKLKEVTLFVKRLRRKTYLSNMAKTMRMVLKSKRRVSVLKSDLQAII

SEQ ID NO: 40354 - protein, 48 aa, Artificial Sequence
  Quasi-synthetic sequence derived from human genome
KLCSRFLLKCGFITIPWRCIKKCSPLMPRAAVPRFVQQKLYLFLQHCF

SEQ ID NO: 40355 - protein, 48 aa, Artificial Sequence
  Quasi-synthetic sequence derived from human genome
VPRKLLSHGKKPFSQHVRKLRASITPGTILIILTGRHRGKRVVFLKQL

SEQ ID NO: 40356 - protein, 48 aa, Artificial Sequence
  Quasi-synthetic sequence derived from human genome
VSFLVLQRRRLPPVRPHGPGPARGRPPHPALPHRRRLHGRPVRRLFLL

SEQ ID NO: 40357 - protein, 48 aa, Artificial Sequence
  Quasi-synthetic sequence derived from human genome
LKLPWTQVGFSLLFLYLGSGGWRFIRVFIKTIRRDIFGGLVLLKVKAK

SEQ ID NO: 40358 - protein, 48 aa, Artificial Sequence
  Quasi-synthetic sequence derived from human genome
TSEFKGAALVSPISKRWTHLVRLLRLIILIRIFHLLHQKRQLEKLMRR

SEQ ID NO: 40359 - protein, 48 aa, Artificial Sequence
  Quasi-synthetic sequence derived from human genome
KSRMSAVAAEIKQIRARRKTARMLMIVLLVFAICYLPISILNVLKRVF

SEQ ID NO: 40360 - protein, 48 aa, Artificial Sequence
  Quasi-synthetic sequence derived from human genome
KVIKTRYRIVKKTPASPLSAPPFPLSLPSWRARRLSLSRSLVLNRLRP

SEQ ID NO: 40361 - protein, 48 aa, Artificial Sequence
  Quasi-synthetic sequence derived from human genome
KRKARTVLKSTSKLMTQMRMGKKKRAMKGKKPSFMVIRFPGRRGYGRL

SEQ ID NO: 40362 - protein, 48 aa, Artificial Sequence
  Quasi-synthetic sequence derived from human genome
WRRKKKSRMTFFVTQLAITEKQARVLIVIAWSLSFLFSIPTLIIFGKR

SEQ ID NO: 40363 - protein, 48 aa, Artificial Sequence
  Quasi-synthetic sequence derived from human genome
RAGITAAINLAKLKLFRHYYVLIVCYIYFTRIIAFLLKLAVPFQWKWL

SEQ ID NO: 40364 - protein, 48 aa, Artificial Sequence
  Quasi-synthetic sequence derived from human genome
SRIPLVRNRRFQLCRCMNPRARKNRSQIALFQKLRFQFFCSMSGRAWV

SEQ ID NO: 40365 - protein, 48 aa, Artificial Sequence
  Quasi-synthetic sequence derived from human genome
MLRTALRGAPRLLSRVQPRAPCLRRLWGRGARPEVAGRRRAWAWGWRR

SEQ ID NO: 40366 - protein, 48 aa, Artificial Sequence
  Quasi-synthetic sequence derived from human genome
FPIPRNSTVNIPLFRRFGRQRKIGGRGRIISPYRTPVLRRHRYSIFRS

SEQ ID NO: 40367 - protein, 48 aa, Artificial Sequence
  Quasi-synthetic sequence derived from human genome
RKPLSGRTPRLVYKWFLLIYKLSYAFGVVGYLAIMFTMCGFNLFFKIK

SEQ ID NO: 40368 - protein, 48 aa, Artificial Sequence
  Quasi-synthetic sequence derived from human genome
ICWGLGIEYTFPPLYYRRAHRRFVTKKALCIRVFQETQKLKKRRRALK

SEQ ID NO: 40369 - protein, 48 aa, Artificial Sequence
  Quasi-synthetic sequence derived from human genome
LLKELVRFQDRMYQKDPVKAKTKRRLVLGLREVLKHLKLKKLKCVIIS

SEQ ID NO: 40370 - protein, 48 aa, Artificial Sequence
  Quasi-synthetic sequence derived from human genome
RVDLFYLRGDRGQILVICLIAVMVVFIILVIGVCTCCHPLRKRRKRKK

SEQ ID NO: 40371 - protein, 48 aa, Artificial Sequence
  Quasi-synthetic sequence derived from human genome
LYLNRAACHLKLKNLHKAIEDSSKAYRIMKRHLRLIHPTKLYKLMLRR

SEQ ID NO: 40372 - protein, 48 aa, Artificial Sequence
  Quasi-synthetic sequence derived from human genome
LLGRLAAIVAKQVLLGRKVVVVRCEGINISGNFYRNKLKYLAFLRKRM

SEQ ID NO: 40373 - protein, 48 aa, Artificial Sequence
  Quasi-synthetic sequence derived from human genome
FLLMKKSQIVIAAWYRRYAQQKRYQQTKSSALVIQSYIRGWKARKILR

SEQ ID NO: 40374 - protein, 48 aa, Artificial Sequence
  Quasi-synthetic sequence derived from human genome
KYWDYRYKKNLKALYVVHPTSFIKVLWNILKPLISHKFGKKVIYFNYL

SEQ ID NO: 40375 - protein, 48 aa, Artificial Sequence
  Quasi-synthetic sequence derived from human genome
MGFVRQIQLLLWKNWTLRKRQKIRFVVELVWPLSLFLVLIWLRNANPL

SEQ ID NO: 40376 - protein, 48 aa, Artificial Sequence
  Quasi-synthetic sequence derived from human genome
IHILQIRKLRHRLSNFPRLPGILAPETVLLPFCYKVFRKKEKVKRSQK

SEQ ID NO: 40377 - protein, 48 aa, Artificial Sequence
  Quasi-synthetic sequence derived from human genome
YLFIIIKVKSSGIRVGSSKRKKSEKKVTRMVSIVVAVFIFCWLPFYIF

SEQ ID NO: 40378 - protein, 48 aa, Artificial Sequence
  Quasi-synthetic sequence derived from human genome
LVLGFVLPVCTICVLYTDLLRRLRAVRLRSGAKALGKARRKVTVLVLV

SEQ ID NO: 40379 - protein, 48 aa, Artificial Sequence
  Quasi-synthetic sequence derived from human genome
LLQKVIRGFKDRSNFLKLKNAATLIQRHWRGHNCRKNYGLMRLGFLRL

SEQ ID NO: 40380 - protein, 48 aa, Artificial Sequence
  Quasi-synthetic sequence derived from human genome
LRFKYLLKQALATGMRRGLLARPLNSKARGATGSFKLVPKHKKKIQPR

SEQ ID NO: 40381 - protein, 48 aa, Artificial Sequence
  Quasi-synthetic sequence derived from human genome
FQRALCLLCFYLKYLNMYASICFLTCISLQRCFFLLKPFRARDWKRRY

SEQ ID NO: 40382 - protein, 48 aa, Artificial Sequence
  Quasi-synthetic sequence derived from human genome
WLQKVKYHRLKGATLTLQRYCRGHLARRLAEHLRRIRAAVVLQKHYRM

SEQ ID NO: 40383 - protein, 48 aa, Artificial Sequence
  Quasi-synthetic sequence derived from human genome
AIIFSYPSTHPFILILGNKKLKQIFLSVLRHVRYWVKDRSLRLHRFTR

SEQ ID NO: 40384 - protein, 48 aa, Artificial Sequence
  Quasi-synthetic sequence derived from human genome
MRPRSGGRPGATGRRRRRLRRRPRGLRCSRLPPPPPLPLLLGLLLAAA

SEQ ID NO: 40385 - protein, 48 aa, Artificial Sequence
  Quasi-synthetic sequence derived from human genome
FRNPVIERIPRLRRQKKIFSKQQGKAFQRARQMNIDVATWVRLLRRLI

SEQ ID NO: 40386 - protein, 48 aa, Artificial Sequence
  Quasi-synthetic sequence derived from human genome
WPRWLGVAALGLAAVALGTVAWRRAWPRRRRRLQQVGTVAKLWIYPVK

SEQ ID NO: 40387 - protein, 48 aa, Artificial Sequence
  Quasi-synthetic sequence derived from human genome
LRTLRAVRVLRPLKLVSGIPSLQIVLKSIMKAMVPLLQIGLLLFFAIL

SEQ ID NO: 40388 - protein, 48 aa, Artificial Sequence
  Quasi-synthetic sequence derived from human genome
DLLVKLRLCFLVMAYGTTIFHPLLYAFTRQKFQKVLKSKMKKRVVSIV

SEQ ID NO: 40389 - protein, 48 aa, Artificial Sequence
  Quasi-synthetic sequence derived from human genome
ILIILTGRHRGKRVVFLKQLASGLLLVTGPLVLNRVPLRRTHQKFVIA

SEQ ID NO: 40390 - protein, 48 aa, Artificial Sequence
  Quasi-synthetic sequence derived from human genome
KFMNELHKIPLPPWALIAIAIVAVLLVLTCCFCICKKCLFKKKNKKKG

SEQ ID NO: 40391 - protein, 48 aa, Artificial Sequence
  Quasi-synthetic sequence derived from human genome
TISIVSYLFAKSNTVYNPVIYVFMIRKFRRSLLQLLCLRLLRCQRPAK

SEQ ID NO: 40392 - protein, 48 aa, Artificial Sequence
  Quasi-synthetic sequence derived from human genome
YLKSVQLFSKKFKLWLLNALEGVPALLQISKLKEVTLFVKRLRRKTYL

SEQ ID NO: 40393 - protein, 48 aa, Artificial Sequence
  Quasi-synthetic sequence derived from human genome
LWLRDTYKLWVPQPPPRTIKRTRRRLSRNRDPGRLILSTIRLRPRQVL

SEQ ID NO: 40394 - protein, 48 aa, Artificial Sequence
  Quasi-synthetic sequence derived from human genome
LIAVRLASLNQILDPWVYLLLRKILLRKFCQMRKRRLREQFWRPASSG

SEQ ID NO: 40395 - protein, 48 aa, Artificial Sequence
  Quasi-synthetic sequence derived from human genome
ITLMRRILTRNEKNRPRRRFLCHLSRQQLRMAMRIPVLYEQLKREKLR

SEQ ID NO: 40396 - protein, 48 aa, Artificial Sequence
  Quasi-synthetic sequence derived from human genome
GKLMRIKFQKILEERDALILIQWNIRAFMAVKNWPWMRLFFKIKPLVK

SEQ ID NO: 40397 - protein, 48 aa, Artificial Sequence
  Quasi-synthetic sequence derived from human genome
WWRNNFWIILAVAIIVVSVGLGLILYCVCKWQLRRGKKWEIAKPLKHK

SEQ ID NO: 40398 - protein, 48 aa, Artificial Sequence
  Quasi-synthetic sequence derived from human genome
LLFVAIFTGTVLSDIIQKYFFSPTLFRVIRLARIGRILRLIRGAKGIR

SEQ ID NO: 40399 - protein, 48 aa, Artificial Sequence
  Quasi-synthetic sequence derived from human genome
IVGTVLSDIIQKYFFSPTLFRVIRLARIGRILRLIRGAKGIRTLLFAL

SEQ ID NO: 40400 - protein, 48 aa, Artificial Sequence
  Quasi-synthetic sequence derived from human genome
IVGLALSDLIQKYFVSPTLFRVIRLARIGRVLRLIRGAKGIRTLLFAL

SEQ ID NO: 40401 - protein, 48 aa, Artificial Sequence
  Quasi-synthetic sequence derived from human genome
APRGSRRPGRTPKWRLPRISARAPYRLRRLRRHTYWPPRRPVAASRCW

SEQ ID NO: 40402 - protein, 48 aa, Artificial Sequence
  Quasi-synthetic sequence derived from human genome
IAIAWLLYCHKTRLKKILKESRQRHLENFRIRAKHLAANWNRIRTSRR

SEQ ID NO: 40403 - protein, 48 aa, Artificial Sequence
  Quasi-synthetic sequence derived from human genome
KICVFIFAFVIPVLIIIVCYTLMILRLKSVRLLSGSREKDRNLRRITR

SEQ ID NO: 40404 - protein, 48 aa, Artificial Sequence
  Quasi-synthetic sequence derived from human genome
LTQTMKLLKLRRNIVKLSLYRHFTNTLILAVAASIVFIIWTTMKFRIV

SEQ ID NO: 40405 - protein, 48 aa, Artificial Sequence
  Quasi-synthetic sequence derived from human genome
RRAKRKVTRMILIVAALFCLCWMPHHALILCVWFGQFPLTRATYALRI

SEQ ID NO: 40406 - protein, 48 aa, Artificial Sequence
  Quasi-synthetic sequence derived from human genome
VVFGVRTSVSVIIALRRAVKRHRERRERQKRVFRMSLLIISTFLLCWT

SEQ ID NO: 40407 - protein, 48 aa, Artificial Sequence
  Quasi-synthetic sequence derived from human genome
KLRSWPLTVLYYLLPFGALRPLSRVGWRPVSRVALYKSVPTRLLSRAW

SEQ ID NO: 40408 - protein, 48 aa, Artificial Sequence
  Quasi-synthetic sequence derived from human genome
KLIRMGPQERWLLRTKRLHWSRLLFLLGMLIIGSTYQHLRRPRGLSSL

SEQ ID NO: 40409 - protein, 48 aa, Artificial Sequence
  Quasi-synthetic sequence derived from human genome
RLRFGPRRALAALVRRGWRCGYLECSAKYNWHVLRLFRELLRCALVRA

SEQ ID NO: 40410 - protein, 48 aa, Artificial Sequence
  Quasi-synthetic sequence derived from human genome
IFYLLASVLLSLLLILKAGRRWNKYFKSRRPLFTGGLIGGLFTYVLFW

SEQ ID NO: 40411 - protein, 48 aa, Artificial Sequence
  Quasi-synthetic sequence derived from human genome
FLGFLLPLLIMSYCYFRIIQTLFSCKNHKKAKAIKLILLVVIVFFLFW

SEQ ID NO: 40412 - protein, 48 aa, Artificial Sequence
  Quasi-synthetic sequence derived from human genome
LLIIRSLRQGLRVEKRLKTKAVRMIAIVLAIFLVCFVPYHVNRSVYVL

SEQ ID NO: 40413 - protein, 48 aa, Artificial Sequence
  Quasi-synthetic sequence derived from human genome
HKCKKKQKSTKKFWIQKLPKVLCLHLKRFHWTAYLRNKVDTYVEFPLR

SEQ ID NO: 40414 - protein, 48 aa, Artificial Sequence
  Quasi-synthetic sequence derived from human genome
WVYLLLRKILLRKFCQMRKRRLREQAPLLPTPTVIDPSRFCAQPFRWF

SEQ ID NO: 40415 - protein, 48 aa, Artificial Sequence
  Quasi-synthetic sequence derived from human genome
IIQRKWRAILPAKIAHEHFLMIKRHRAACLIQAHYRGYKGRQVFLRQK

SEQ ID NO: 40416 - protein, 48 aa, Artificial Sequence
  Quasi-synthetic sequence derived from human genome
IHDGARLFRIKCVTRIQAYWRGCVVRKWYRNLRKTVPPTDAKLRKKFF

SEQ ID NO: 40417 - protein, 48 aa, Artificial Sequence
  Quasi-synthetic sequence derived from human genome
KRRKSNPKPLVLSEARKQLMIYRLPQVLRLHLKRFRWSGRNHREKIGV

SEQ ID NO: 40418 - protein, 48 aa, Artificial Sequence
  Quasi-synthetic sequence derived from human genome
RLFSKVLVTIKKVYMKERSFKGVEFGKNLGLKSSLIRKPRIVSRGRRP

SEQ ID NO: 40419 - protein, 48 aa, Artificial Sequence
  Quasi-synthetic sequence derived from human genome
RGYLARQHFKKRKIQDLAIRCVQKNIKKNKGVKDWPWWKLFTTVRPLI

SEQ ID NO: 40420 - protein, 48 aa, Artificial Sequence
  Quasi-synthetic sequence derived from human genome
IQKESTLHLVLRLRGGAKKRKKKSYTTPKKNKHKRKKVKLAVLKYYKV

SEQ ID NO: 40421 - protein, 48 aa, Artificial Sequence
  Quasi-synthetic sequence derived from human genome
LLLLPLLLLLPLLLLKLHLWPQLRWLPADLAFAVRALCCKRALRARAL

SEQ ID NO: 40422 - protein, 48 aa, Artificial Sequence
  Quasi-synthetic sequence derived from human genome
RGMTKLDRTAFKKTVNIPVLKVRKEIVSKLMRSLKRAALQRPGIRRVI

SEQ ID NO: 40423 - protein, 48 aa, Artificial Sequence
  Quasi-synthetic sequence derived from human genome
VSRRNVNQTRLKRVLSGATLPDKLRDKLKLMKQRRKPPGFLALVKLLR

SEQ ID NO: 40424 - protein, 48 aa, Artificial Sequence
  Quasi-synthetic sequence derived from human genome
MKHFLRMLIQVCLYFYCKFLWRCLKFVMRKLTGRCELQRICYNTKPGA

SEQ ID NO: 40425 - protein, 48 aa, Artificial Sequence
  Quasi-synthetic sequence derived from human genome
LLIPYLLGRKRRWSKCKIRVFVGGQINRMDQERKAIISLLSKFRLGFH

SEQ ID NO: 40426 - protein, 48 aa, Artificial Sequence
  Quasi-synthetic sequence derived from human genome
ALLFVFIYVQLWLVLRYRHKRLSYQSVFLFLCLFWASLRTVLFSFYFK

SEQ ID NO: 40427 - protein, 48 aa, Artificial Sequence
  Quasi-synthetic sequence derived from human genome
FFFNISGILLWYPVPCTRLPIRMAKALGKRTAKYRWFAVLYLLVCFLL

SEQ ID NO: 40428 - protein, 48 aa, Artificial Sequence
  Quasi-synthetic sequence derived from human genome
GWRVLVGVGVPVVFIIILVLCLRLLQSRCPRVLPKKLQNWNFLPLWMR

SEQ ID NO: 40429 - protein, 48 aa, Artificial Sequence
  Quasi-synthetic sequence derived from human genome
FLLGFLLPVLAIGLCYLLIVGKMRAVALRAGWQQRRRSEKKITRLVLM

SEQ ID NO: 40430 - protein, 48 aa, Artificial Sequence
  Quasi-synthetic sequence derived from human genome
VWRQTRTLLLKNYLIKCRTKKSSVQEILFPLFFLFWLILISMMHPNKK

SEQ ID NO: 40431 - protein, 48 aa, Artificial Sequence
  Quasi-synthetic sequence derived from human genome
RRVVQIFRIMRILRILKLARHSTGLQSLGFTLRRSYNELGLLILFLAM

SEQ ID NO: 40432 - protein, 48 aa, Artificial Sequence
  Quasi-synthetic sequence derived from human genome
LRYNILTLMRMLSLKSLKKQMKKVKKMTVKDMVTAFFSSYWSIFMTLL

SEQ ID NO: 40433 - protein, 48 aa, Artificial Sequence
  Quasi-synthetic sequence derived from human genome
LLIYLRVATWNQILDPWVYILFRRAVLRRLQPRLSTRPRRSLTLWPSL

SEQ ID NO: 40434 - protein, 48 aa, Artificial Sequence
  Quasi-synthetic sequence derived from human genome
RRRFVQQKRAAITLQHYFRTWQTRKQFLLYRKAAVVLQNHYRAFLSAK

SEQ ID NO: 40435 - protein, 48 aa, Artificial Sequence
  Quasi-synthetic sequence derived from human genome
VKLRPDNLALIQLTVIMGYLRIIRFLPLFKIIVPILIRIADVQIKKRL

SEQ ID NO: 40436 - protein, 48 aa, Artificial Sequence
  Quasi-synthetic sequence derived from human genome
GNFVYKLFSLQDLLLLVRCSVQRIETRPRSKKRKKIRRQFPVYVLPKV

SEQ ID NO: 40437 - protein, 48 aa, Artificial Sequence
  Quasi-synthetic sequence derived from human genome
LPGLLPQPVLAGVVGGVCFLGVAVLVSILAGCLLNRRRAARRRRKRLR

SEQ ID NO: 40438 - protein, 48 aa, Artificial Sequence
  Quasi-synthetic sequence derived from human genome
SKVFQCGKYLKVFYKFLNSNRHTIRHTGKKCFKCKKCVKSFCIRLHKT

SEQ ID NO: 40439 - protein, 48 aa, Artificial Sequence
  Quasi-synthetic sequence derived from human genome
RKAAIVIQVRCRAYYQGKMQREKYLTILKAVKVLQASFRGVRVRRTLR

SEQ ID NO: 40440 - protein, 48 aa, Artificial Sequence
  Quasi-synthetic sequence derived from human genome
VIQKAVRHFLLRKKQEKFTSGIIKIQALWRGYSWRKKNDCTKIKAIRL

SEQ ID NO: 40441 - protein, 48 aa, Artificial Sequence
  Quasi-synthetic sequence derived from human genome
LKLMGPAGYLTWNYVLNEAIRLSLIMQLVALLLVVLWIRWKCRRLRIR

SEQ ID NO: 40442 - protein, 48 aa, Artificial Sequence
  Quasi-synthetic sequence derived from human genome
KRDVKVSLFTAFFLATIMGVRFKRSKKIMPAGLVAGLSLMMILRLVLL

SEQ ID NO: 40443 - protein, 48 aa, Artificial Sequence
  Quasi-synthetic sequence derived from human genome
CPTNGPKIPSIATGMVGALLLLLVVALGIGLFMRRRHIVRKRTLRRLL

SEQ ID NO: 40444 - protein, 48 aa, Artificial Sequence
  Quasi-synthetic sequence derived from human genome
RLLPRNTFSRKAFKLKKPSKYCSWKCAALSAIAAALLLAILLAYFIAM

SEQ ID NO: 40445 - protein, 48 aa, Artificial Sequence
  Quasi-synthetic sequence derived from human genome
RRKWAVRIIRKFIKGFISRNKPLCPDNEEFIVFVRKNYILNLRYHLPK

SEQ ID NO: 40446 - protein, 48 aa, Artificial Sequence
  Quasi-synthetic sequence derived from human genome
RHPLFIWLKMRISKLVPWMILGSLLYVSMICVFHSKYAGFMVPYFLRK

SEQ ID NO: 40447 - protein, 48 aa, Artificial Sequence
  Quasi-synthetic sequence derived from human genome
FCLFTWDKWLKVYKSIYFLGHIFFLSLLFILPYIHKAMVPRKEKLKKM

SEQ ID NO: 40448 - protein, 48 aa, Artificial Sequence
  Quasi-synthetic sequence derived from human genome
LLMSLFLFFFVLFLCLFFYNCYKGYLPRQCLKFRSALLIGKKKPKSDF

SEQ ID NO: 40449 - protein, 48 aa, Artificial Sequence
  Quasi-synthetic sequence derived from human genome
MVLQRRKFLQMKRRKYGFIYKTHLFGRPTVRVMGADNVRRILLGEHRL

SEQ ID NO: 40450 - protein, 48 aa, Artificial Sequence
  Quasi-synthetic sequence derived from human genome
LAWPGLALPLVAMAAGGRWVRQQGPRVRRGISRLWLRVLLRLSPMAFR

SEQ ID NO: 40451 - protein, 48 aa, Artificial Sequence
  Quasi-synthetic sequence derived from human genome
KRKFKSLLLHKRTAIQHAYRLLISQRRPAGISYRQFEGLMRFYKPRMS

SEQ ID NO: 40452 - protein, 48 aa, Artificial Sequence
  Quasi-synthetic sequence derived from human genome
RIIWSLRQRQMDRHAKIKRAITFIMVVAIVFVICFLPSVVVRIHIFWL

SEQ ID NO: 40453 - protein, 48 aa, Artificial Sequence
  Quasi-synthetic sequence derived from human genome
PVKKNTLKKYKIACIVLLALLVIMSLGLGLGLGLRKLEKQGSCRKKCF

SEQ ID NO: 40454 - protein, 48 aa, Artificial Sequence
  Quasi-synthetic sequence derived from human genome
LLGWSWLRRRRARGIPPGPTPWPLVGNFGHVLLPPFLRRRSWLSSRTR

SEQ ID NO: 40455 - protein, 48 aa, Artificial Sequence
  Quasi-synthetic sequence derived from human genome
WRVFSLFSYVLIYLFSKYLAFNTLFALKRMALQRDRKEKTRAWCIFIK

SEQ ID NO: 40456 - protein, 48 aa, Artificial Sequence
  Quasi-synthetic sequence derived from human genome
LSIVILYCRIYSLVRTRSRRLTFRKNISKASRSSEKSLALLKTVIIVL

SEQ ID NO: 40457 - protein, 48 aa, Artificial Sequence
  Quasi-synthetic sequence derived from human genome
RLLFRIGYSLYTRTWLGYLFYRQQLRRARNRYPKGHSKTQPRLFNGVK

SEQ ID NO: 40458 - protein, 48 aa, Artificial Sequence
  Quasi-synthetic sequence derived from human genome
FLRHVPLRRIHLFTLVQILCLAVLWILKSTVAAIIFPVMILGLIIVRR

SEQ ID NO: 40459 - protein, 48 aa, Artificial Sequence
  Quasi-synthetic sequence derived from human genome
WRMLLRILPQSFGFIVPLLIMLFCYGFTLRTLFKAHMGQKHRAMRVIF

SEQ ID NO: 40460 - protein, 48 aa, Artificial Sequence
  Quasi-synthetic sequence derived from human genome
CRNKQKTFYYLGQELQYIYFIHSLCLLGRLLIYKQGRKLFPIKLKNKK

SEQ ID NO: 40461 - protein, 48 aa, Artificial Sequence
  Quasi-synthetic sequence derived from human genome
LVLLFSQYARNVKFPLPIYKSKKGWTAYKLQLFKMFPIILAILVSWLL

SEQ ID NO: 40462 - protein, 48 aa, Artificial Sequence
  Quasi-synthetic sequence derived from human genome
RWHWQKKVINKGLFFLGSLIAISSTYLLIHYMSPRSFLRLRRPWNWIA

SEQ ID NO: 40463 - protein, 48 aa, Artificial Sequence
  Quasi-synthetic sequence derived from human genome
LCGQSFRGWVALVLHLRAHSAAKRPIACPKCERRFWRRKQLRAHLRRC

SEQ ID NO: 40464 - protein, 48 aa, Artificial Sequence
  Quasi-synthetic sequence derived from human genome
IFPRLARHDRGNYVRLNMKQKHYVRGRALRSRLLRKQAWKQKWRKKGE

SEQ ID NO: 40465 - protein, 48 aa, Artificial Sequence
  Quasi-synthetic sequence derived from human genome
RISITFFRLFRVMRLVKLLSRGEGIRTLLWTFIKSFQALPYVALLIVM

SEQ ID NO: 40466 - protein, 48 aa, Artificial Sequence
  Quasi-synthetic sequence derived from human genome
RIQRAYKLYLAVKNANKQVNSVICIQRWFRARLQEKRFIQKYHSIKKI

SEQ ID NO: 40467 - protein, 48 aa, Artificial Sequence
  Quasi-synthetic sequence derived from human genome
LKKITKTVQQRYWAMKERNIQFQRYNKLRHSVIYIQAIFRGKKARRHL

SEQ ID NO: 40468 - protein, 48 aa, Artificial Sequence
  Quasi-synthetic sequence derived from human genome
CLLRFPSRYWLGAYQLQRVVLAFMVPLGVITTSYLLLLAFLQRRQRRR

SEQ ID NO: 40469 - protein, 48 aa, Artificial Sequence
  Quasi-synthetic sequence derived from human genome
VRGYLARRRIRLWHRGAMVIQATWRGYRVRRNLAHLCRATTTIQSAWR

SEQ ID NO: 40470 - protein, 48 aa, Artificial Sequence
  Quasi-synthetic sequence derived from human genome
KRRQARRTAVIVQQKLRSSLLTKKQDQAARKIMRFLRRCRHRVKELKK

SEQ ID NO: 40471 - protein, 48 aa, Artificial Sequence
  Quasi-synthetic sequence derived from human genome
YVKVFHKYSNSNRYKIRHTKKKTFKCMKCSKSFFMLSHLIQHKRIHTR

SEQ ID NO: 40472 - protein, 48 aa, Artificial Sequence
  Quasi-synthetic sequence derived from human genome
RGYRQRKIYLEWLQYFKANLDAIIKIQAWARMWAARRQYLRRLHYFQK

SEQ ID NO: 40473 - protein, 48 aa, Artificial Sequence
  Quasi-synthetic sequence derived from human genome
IFLFSFIVPVLVISVCYSLMIRRLRGVRLLSGSREKDRNLRRITRLVL

SEQ ID NO: 40474 - protein, 48 aa, Artificial Sequence
  Quasi-synthetic sequence derived from human genome
LRRGRPKRRRKPQPHSGSVLALPLRSRKIRKQLRSVVSRMAALRTQTL

SEQ ID NO: 40475 - protein, 48 aa, Artificial Sequence
  Quasi-synthetic sequence derived from human genome
KTNRIARILAGSKKKICTKKPRFMSACAQLVIAFILICIQLGIIVALF

SEQ ID NO: 40476 - protein, 48 aa, Artificial Sequence
  Quasi-synthetic sequence derived from human genome
AAVRSLLSPGLLPHLLPALGFKNKTVLKKRCKDCYLVKRRGRWYVYCK

SEQ ID NO: 40477 - protein, 48 aa, Artificial Sequence
  Quasi-synthetic sequence derived from human genome
KFFLYVCMYVCIREKILLYKTHWMTPIFLKVVINTRRIKHHFKIHVPS

SEQ ID NO: 40478 - protein, 48 aa, Artificial Sequence
  Quasi-synthetic sequence derived from human genome
IIYPCSSKEFKRAFVRILGCQCRGRGRRRRRRRRRLGGCAYTYRPWTR

SEQ ID NO: 40479 - protein, 48 aa, Artificial Sequence
  Quasi-synthetic sequence derived from human genome
FYFFSFTLFFSFPHLLSPSKIKTFLSLVWKRRILFFVVTLVSVFLVWK

SEQ ID NO: 40480 - protein, 48 aa, Artificial Sequence
  Quasi-synthetic sequence derived from human genome
RTLHQRFLAQLRKYFNMRVFRQRTYRIWAFGIAAAALGYFVPYVHLMK

SEQ ID NO: 40481 - protein, 48 aa, Artificial Sequence
  Quasi-synthetic sequence derived from human genome
KTLTKPVTLSRSKINKTKVLKMIFVHLIIFCFCFVPYNINLILYSLVR

SEQ ID NO: 40482 - protein, 48 aa, Artificial Sequence
  Quasi-synthetic sequence derived from human genome
KRRKKRYLRHDKPPYTYLAMIALVIQAAPSRRLKLAQIIRQVQAVFPF

SEQ ID NO: 40483 - protein, 48 aa, Artificial Sequence
  Quasi-synthetic sequence derived from human genome
RKAIIIFVPVPQLKSFQKIQVRLVRELEKKFSGKHVVFIAQRRILPKP

SEQ ID NO: 40484 - protein, 48 aa, Artificial Sequence
  Quasi-synthetic sequence derived from human genome
KWKNFKGLKLLCRDKIRLNNAIWRAWYIQYVKRRKSPVCGFVTPLQGP

SEQ ID NO: 40485 - protein, 48 aa, Artificial Sequence
  Quasi-synthetic sequence derived from human genome
WCFIRHGRTAYLQLYATLLLLLIVSVLACNFSVILNLIRMHRRSRRSR

SEQ ID NO: 40486 - protein, 48 aa, Artificial Sequence
  Quasi-synthetic sequence derived from human genome
KKKTTFFKRGKKLKCYLMPFGTGTSKCPGRFFALMEIKQLLVILLTYF

SEQ ID NO: 40487 - protein, 48 aa, Artificial Sequence
  Quasi-synthetic sequence derived from human genome
RIQIWAELAKVARKQGVWDVCRTASRFCLLYDNVKVKKLRLRRGKKKR

SEQ ID NO: 40488 - protein, 48 aa, Artificial Sequence
  Quasi-synthetic sequence derived from human genome
RVSRLGRRLGRRRRPRSPPEPLRVRARLRLRSPSGAFAALGALVVLVG

SEQ ID NO: 40489 - protein, 48 aa, Artificial Sequence
  Quasi-synthetic sequence derived from human genome
IIKTLLRCPSKKKYKAIRLIFVIMAVFFIFWTPYNVAILLSSYQSILF

SEQ ID NO: 40490 - protein, 48 aa, Artificial Sequence
  Quasi-synthetic sequence derived from human genome
KVARSLALALLCLVLSTCVGPYLFPYFIPLNGDRLLRNKKRKARWLRA

SEQ ID NO: 40491 - protein, 48 aa, Artificial Sequence
  Quasi-synthetic sequence derived from human genome
GRVQGWALTRQQLQALLLKRFLLARRSRRGLFAQIVLPALFVGLALVF

SEQ ID NO: 40492 - protein, 48 aa, Artificial Sequence
  Quasi-synthetic sequence derived from human genome
FFRLFRVMRLIKLLSRAEGVRTLLWTFIKSFQALPYVALLIVMLFFIY

SEQ ID NO: 40493 - protein, 48 aa, Artificial Sequence
  Quasi-synthetic sequence derived from human genome
PKSVWYRIAFWLQWFNSFVNPLLYPLCHKRFQKAFLKIFCIKKQPLPS

SEQ ID NO: 40494 - protein, 48 aa, Artificial Sequence
  Quasi-synthetic sequence derived from human genome
QTMKTLRLRKNTVKFSLYRHFKNTLIFAVLASIVFMGWTTKTFRIAKC

SEQ ID NO: 40495 - protein, 48 aa, Artificial Sequence
  Quasi-synthetic sequence derived from human genome
VLRCIRLLRIFKITKYWTSLSNLVASLLNSIRSIASLLLLLFLFIVIF

SEQ ID NO: 40496 - protein, 48 aa, Artificial Sequence
  Quasi-synthetic sequence derived from human genome
IMYKVPLIRKKSLRRTLSERGLLKDFLKKHNLNPARKYFPQWKAPTLV

SEQ ID NO: 40497 - protein, 48 aa, Artificial Sequence
  Quasi-synthetic sequence derived from human genome
AAPRALLPQWPRRPGRRWPASPLGMKVFRRKALVLCAGYALLLVLTML

SEQ ID NO: 40498 - protein, 48 aa, Artificial Sequence
  Quasi-synthetic sequence derived from human genome
WAIFRPGTSFGISVLRALRLLRIFKITKYWASLRNLVVSLMSSMKSII

SEQ ID NO: 40499 - protein, 48 aa, Artificial Sequence
  Quasi-synthetic sequence derived from human genome
KLFAIIVGRGIRKWWQALPPNKKEVVKENIRKNKWKLFLGLSSFGLLF

SEQ ID NO: 40500 - protein, 48 aa, Artificial Sequence
  Quasi-synthetic sequence derived from human genome
VPVTLWHLGYWLCYVNSTVNPICYALCNRTFRKTFKMLLLCRWKKKKV

SEQ ID NO: 40501 - protein, 48 aa, Artificial Sequence
  Quasi-synthetic sequence derived from human genome
RRFRRWLNRYSYTVLSSWPERALISLKNRSRFLVRPNTRNRAFSWTCR

SEQ ID NO: 40502 - protein, 48 aa, Artificial Sequence
  Quasi-synthetic sequence derived from human genome
FFGFHRLLLKWRGSIYKLLYREFIVFAVLYTAISLVYRLLLTGVQKRY

SEQ ID NO: 40503 - protein, 48 aa, Artificial Sequence
  Quasi-synthetic sequence derived from human genome
RSRTSILIICILITGLGIISVISHLTKRRRSQRNRRVGNTLKPFSRVL

SEQ ID NO: 40504 - protein, 48 aa, Artificial Sequence
  Quasi-synthetic sequence derived from human genome
KTRWLYGFIRFLLYFSCSLFTAALWGALAALFCLQYLGVRVLLRFQRK

SEQ ID NO: 40505 - protein, 48 aa, Artificial Sequence
  Quasi-synthetic sequence derived from human genome
VRAVYRVLKNCPSVALKKKAKCLLSKWKAVYKQTHSKARNSPKLFPVR

SEQ ID NO: 40506 - protein, 48 aa, Artificial Sequence
  Quasi-synthetic sequence derived from human genome
QIILRISFLILLGIGIYALWKRSIQSIQKTLLFVITLYKLYKKGSHIF

SEQ ID NO: 40507 - protein, 48 aa, Artificial Sequence
  Quasi-synthetic sequence derived from human genome
PGRLRGVRAVRPKVLMRLSKTKKHVSRAYGGSMCAKCVRDRIKRAFLI

SEQ ID NO: 40508 - protein, 48 aa, Artificial Sequence
  Quasi-synthetic sequence derived from human genome
KRAAAIQLQAAFRRLKAHNLCRQIRAACVIQSYWRMRQDRVRFLNLKK

SEQ ID NO: 40509 - protein, 48 aa, Artificial Sequence
  Quasi-synthetic sequence derived from human genome
FLKITSTRLLCSRLCQQLRSKRKFFGTVPISRLHRRVVITGIGLVTPL

SEQ ID NO: 40510 - protein, 48 aa, Artificial Sequence
  Quasi-synthetic sequence derived from human genome
SHIPLRPKHWFQLCRPMNPRARKNCSQIALFQKRRFQFFCSMRCRAWV

SEQ ID NO: 40511 - protein, 48 aa, Artificial Sequence
  Quasi-synthetic sequence derived from human genome
LISFGIQSSAINVVKILRVLRVLRPLRAINRAKGLKHVVQCVFVAIRT

SEQ ID NO: 40512 - protein, 48 aa, Artificial Sequence
  Quasi-synthetic sequence derived from human genome
ILFKVITVFLNHSNLWFAAWLKVFYCLRIANFNHPLFFLMKRKIIVLM

SEQ ID NO: 40513 - protein, 48 aa, Artificial Sequence
  Quasi-synthetic sequence derived from human genome
WRLILSKILKKRRQAALEAFSRKEWAAVTLQSQARMWRIRRRYCQVLN

SEQ ID NO: 40514 - protein, 48 aa, Artificial Sequence
  Quasi-synthetic sequence derived from human genome
GLNMRVIQVWFQNRRSKERRMKQLSALGARRHAFFRSPRRMRPLGGRL

SEQ ID NO: 40515 - protein, 48 aa, Artificial Sequence
  Quasi-synthetic sequence derived from human genome
LRALLVVVNALLRKRRYHAALAVLKGFRNGAVYGAKIRAPHALVMTFL

SEQ ID NO: 40516 - protein, 48 aa, Artificial Sequence
  Quasi-synthetic sequence derived from human genome
IKRNWRKPRGIDNRVRRRFKGQILMPNIGYGSNKKTKHMLPSGFRKFL

SEQ ID NO: 40517 - protein, 48 aa, Artificial Sequence
  Quasi-synthetic sequence derived from human genome
MIIVIFCYLRIWILVLQVRQRVKPDRKPKLKPQDFRNFVTMFVVFVLF

SEQ ID NO: 40518 - protein, 48 aa, Artificial Sequence
  Quasi-synthetic sequence derived from human genome
SWRRRKSLWLALSASWLLLVLLGGFSLLRLALPPRPRPGASQGWPRWL

SEQ ID NO: 40519 - protein, 48 aa, Artificial Sequence
  Quasi-synthetic sequence derived from human genome
LMRIEFKKIVERRDALLVIQWNIRAFMGVKNWPWMKLYFKIKPLLKSA

SEQ ID NO: 40520 - protein, 48 aa, Artificial Sequence
  Quasi-synthetic sequence derived from human genome
KKLRPHLAKVLVYELLLGKGFRGGGGRWKALLGRHQARLKAELARLKV

SEQ ID NO: 40521 - protein, 48 aa, Artificial Sequence
  Quasi-synthetic sequence derived from human genome
VVIIQKRFRCFQAQKLYKRRKESILTIQKYYKAYLKGKIERTNYLQKR

SEQ ID NO: 40522 - protein, 48 aa, Artificial Sequence
  Quasi-synthetic sequence derived from human genome
RKYKKNLKALYVVHPTSFIKVLWNILKPLISHKFGKKVIYFNYLSELH

SEQ ID NO: 40523 - protein, 48 aa, Artificial Sequence
  Quasi-synthetic sequence derived from human genome
RLRMVWRRKRKPAGRQQPNPLPHLWRRTPQTRRKSLAYAHIFSPNLCF

SEQ ID NO: 40524 - protein, 48 aa, Artificial Sequence
  Quasi-synthetic sequence derived from human genome
RWRRLRLQQLRRLRGLLRVLRGRPGAGSRRRGRMALCGQAAGAASLPS

SEQ ID NO: 40525 - protein, 48 aa, Artificial Sequence
  Quasi-synthetic sequence derived from human genome
RISITFFRLFRVMRLVKLLSRGEGIRTLLWTFIKSFQALPYVALLIAM

SEQ ID NO: 40526 - protein, 48 aa, Artificial Sequence
  Quasi-synthetic sequence derived from human genome
CLAVLGRALPTSRLDLACSLSWNVIRYSLQKLRLVRWLLKKVFQCRRA

SEQ ID NO: 40527 - protein, 48 aa, Artificial Sequence
  Quasi-synthetic sequence derived from human genome
QLIRMATITMQAYSRGFLARRRYRKMLEEHKAVILQKYARAWLARRRF

SEQ ID NO: 40528 - protein, 48 aa, Artificial Sequence
  Quasi-synthetic sequence derived from human genome
KHKKKVNKGSTAARTFYLIKDIRFLLHEPIVNKFREYKVFVRKLRKAY

SEQ ID NO: 40529 - protein, 48 aa, Artificial Sequence
  Quasi-synthetic sequence derived from human genome
MKTRVCRRLRRANRVLRARCRRAVKSNACYWAVLLLVFLNTLTIASEH

SEQ ID NO: 40530 - protein, 48 aa, Artificial Sequence
  Quasi-synthetic sequence derived from human genome
MAKPFFRLQKFLRRTQFLLFFLTAAYLMTGSLLLLQRVRVALPQGPRA

SEQ ID NO: 40531 - protein, 48 aa, Artificial Sequence
  Quasi-synthetic sequence derived from human genome
RLPERRYIENIYHSKPMRWPFFLFIPFFIIFCVLIAIMVKVNFQRKKW

SEQ ID NO: 40532 - protein, 48 aa, Artificial Sequence
  Quasi-synthetic sequence derived from human genome
VLRCVRLLRIFKITRYWNSLSNLVASLLNSVRSIASLLLLLFLFIIIF

SEQ ID NO: 40533 - protein, 48 aa, Artificial Sequence
  Quasi-synthetic sequence derived from human genome
SRYPLLLPKGVVLKLKPVATRFPRKAWRQKRSSVLKPLLIQPSPSLQP

SEQ ID NO: 40534 - protein, 48 aa, Artificial Sequence
  Quasi-synthetic sequence derived from human genome
QKVKKIWQKQFRWPKNRLQILKFCKAREDLLKIQKERDFHRMHHKRIV

SEQ ID NO: 40535 - protein, 48 aa, Artificial Sequence
  Quasi-synthetic sequence derived from human genome
FFRLFRVMRLVKLLSRGEGIRTLLWTFIKSFQALPYVALLIVMLFFIY

SEQ ID NO: 40536 - protein, 48 aa, Artificial Sequence
  Quasi-synthetic sequence derived from human genome
ALKAKKAVLKGVHSHKKKKIRTSPTFRRPKTLRLRRQPKYPRKSAPRR

SEQ ID NO: 40537 - protein, 48 aa, Artificial Sequence
  Quasi-synthetic sequence derived from human genome
RLVALKKFVAVLAKYFPGRPLVQNFLHSVNEWLKRQKRNKIPYSFFKT

SEQ ID NO: 40538 - protein, 48 aa, Artificial Sequence
  Quasi-synthetic sequence derived from human genome
LWLKNRTLDEYLTYLLLWVKQRKDLLHLCCKKLKILGMPFRNIRSILK

SEQ ID NO: 40539 - protein, 48 aa, Artificial Sequence
  Quasi-synthetic sequence derived from human genome
CPKYFMKLVNLYKGAVLYLLRGRKTFLIPVLFNNYITAALKLLEKLYK

SEQ ID NO: 40540 - protein, 48 aa, Artificial Sequence
  Quasi-synthetic sequence derived from human genome
IFMVKIFMLLVVGITSGMWIWTSKTLQSWQQVCSRRLKKKSRRKPASV

SEQ ID NO: 40541 - protein, 48 aa, Artificial Sequence
  Quasi-synthetic sequence derived from human genome
KPVFMFCKAIRFSYPSIHPFILIWGNKKLKQTFLSVLRQVRYWVKGEK

SEQ ID NO: 40542 - protein, 48 aa, Artificial Sequence
  Quasi-synthetic sequence derived from human genome
FRQRIILRVWWSTWRQRLGQVRVSRALHASALKHRALSLQVQAWSQWR

SEQ ID NO: 40543 - protein, 48 aa, Artificial Sequence
  Quasi-synthetic sequence derived from human genome
SHKTFKIKQFLAKKQKQNRPIPQWIRMKTGNKIRYNSKRRHWKRTKLG

SEQ ID NO: 40544 - protein, 48 aa, Artificial Sequence
  Quasi-synthetic sequence derived from human genome
KRRRAKKARLLGPTVMLGGCEFSRQRLQAFGLNPKRLHFRQLGRQRRK

SEQ ID NO: 40545 - protein, 48 aa, Artificial Sequence
  Quasi-synthetic sequence derived from human genome
LILKNKLKVRTAYPSLRLIHAVRGYWLTNKVPIKRPSTGLLMYTLATR

SEQ ID NO: 40546 - protein, 48 aa, Artificial Sequence
  Quasi-synthetic sequence derived from human genome
RLTYLIKKTWMFGLPFCKFVSAMLHIHMYLTFLFYVVILVTRYLIFFK

SEQ ID NO: 40547 - protein, 48 aa, Artificial Sequence
  Quasi-synthetic sequence derived from human genome
VPGPLFKFFFWIGYCNSSLNPVIYTVFNQDFRRSFKHILFRRRRRGFR

SEQ ID NO: 40548 - protein, 48 aa, Artificial Sequence
  Quasi-synthetic sequence derived from human genome
RKFASIARNQVRKKRQMAARERKVTRTIFAILLAFILTWTPYNVMVLV

SEQ ID NO: 40549 - protein, 48 aa, Artificial Sequence
  Quasi-synthetic sequence derived from human genome
RKAAKRKWAAQTIRRLIRGFVLRHAPRCPENAFFLDHVRTSFLLNLRR

SEQ ID NO: 40550 - protein, 48 aa, Artificial Sequence
  Quasi-synthetic sequence derived from human genome
WQRRVATWFNQPARKIRRRKARQAKARRIAPRPASGPIRPIVRCPTVR

SEQ ID NO: 40551 - protein, 48 aa, Artificial Sequence
  Quasi-synthetic sequence derived from human genome
RTLTSWLRVRFGTWNWIWRRCCRAASAAVLAPLGFTLRKPPAVGRNRR

SEQ ID NO: 40552 - protein, 48 aa, Artificial Sequence
  Quasi-synthetic sequence derived from human genome
RKRKCDLRAVRVGLLLGGGGVYGSRFRFTFPGCRALSPWRVRVQRRRC

SEQ ID NO: 40553 - protein, 48 aa, Artificial Sequence
  Quasi-synthetic sequence derived from human genome
LLMVLRCLRPLRIFKLVPQMRKVVRELFSGFKEIFLVSILLLTLMLVF

SEQ ID NO: 40554 - protein, 48 aa, Artificial Sequence
  Quasi-synthetic sequence derived from human genome
KLVLMIGDIVTVIFPSSHSFILIMGNSKLREAFLKMLRFVKCFLRRRK

SEQ ID NO: 40555 - protein, 48 aa, Artificial Sequence
  Quasi-synthetic sequence derived from human genome
RWLQKVARSLALALLCLVLSTCVGPYLFPYFIPLNGDRLLRNKKRKAR

SEQ ID NO: 40556 - protein, 48 aa, Artificial Sequence
  Quasi-synthetic sequence derived from human genome
VILLALGALLVLQLIRRRRREHGALWLPPGFTRRPRTQSAPHRRRPPL

SEQ ID NO: 40557 - protein, 48 aa, Artificial Sequence
  Quasi-synthetic sequence derived from human genome
YRGIRVRRHIQHMHRAATFIKAMFKMHQSRISYHTMRKAAIVIQVRCR

SEQ ID NO: 40558 - protein, 48 aa, Artificial Sequence
  Quasi-synthetic sequence derived from human genome
WWAYAIHGVLEVNVCPRLWMWSWKHIRKHRQKVKQYKELYKKKLTSKK

SEQ ID NO: 40559 - protein, 48 aa, Artificial Sequence
  Quasi-synthetic sequence derived from human genome
PVFWRRLLGLLPGRPGLAALLGRLSDRLGRNRDRQRRRSPWLLLAPLL

SEQ ID NO: 40560 - protein, 48 aa, Artificial Sequence
  Quasi-synthetic sequence derived from human genome
YRCWRAHKEYLAILKAVKIIQGCFYTKLERTRFLNVRASAIIIQRKWR

SEQ ID NO: 40561 - protein, 48 aa, Artificial Sequence
  Quasi-synthetic sequence derived from human genome
PIYPGHGMMFVRNDCKVFRFCKSKCHKNFKKKRNPRKVRWTKAFRKAA

SEQ ID NO: 40562 - protein, 48 aa, Artificial Sequence
  Quasi-synthetic sequence derived from human genome
IIYCHKLTIILTKWRNTARHKSKKKEDELILKHELQLKKWKNRLILKR

SEQ ID NO: 40563 - protein, 48 aa, Artificial Sequence
  Quasi-synthetic sequence derived from human genome
YHTQHKGRLKHRGSSLHPFRKGLQEKDKVWLLREQKRKKKLRKLLKRL

SEQ ID NO: 40564 - protein, 48 aa, Artificial Sequence
  Quasi-synthetic sequence derived from human genome
RLRFLFNELRPAVCNDLSIMSKFKLLSSLPHWRRIAQKIIREPRKKRV

SEQ ID NO: 40565 - protein, 48 aa, Artificial Sequence
  Quasi-synthetic sequence derived from human genome
KTKIFIRSPKTLFYLEEQRRLRLQQLATLIQKIYRGWRCRTHYQLMRK

SEQ ID NO: 40566 - protein, 48 aa, Artificial Sequence
  Quasi-synthetic sequence derived from human genome
KILRFSSPIFYGNVDGFKKCIKSTVGFDAIRVYNKRLKALRKIQKLIK

SEQ ID NO: 40567 - protein, 48 aa, Artificial Sequence
  Quasi-synthetic sequence derived from human genome
LTIIRYYRRYKVKSYIHEVARRFHGVKTMRDYGKHVKWPSPPKVLRRF

SEQ ID NO: 40568 - protein, 48 aa, Artificial Sequence
  Quasi-synthetic sequence derived from human genome
HLPIQLFPKSFFSSKAKVIYLMRNPRDVLVSGYFFWKNMKFIKKPKSW

SEQ ID NO: 40569 - protein, 48 aa, Artificial Sequence
  Quasi-synthetic sequence derived from human genome
KPGTSFGISVLRALRLLRIFKVTKYWASLRNLVVSLLNSMKSIISLLF

SEQ ID NO: 40570 - protein, 48 aa, Artificial Sequence
  Quasi-synthetic sequence derived from human genome
KLKGDYRTGKRLNIRKVIPYIASQFRKDKIWLRRTKPSKRQYQICLAI

SEQ ID NO: 40571 - protein, 48 aa, Artificial Sequence
  Quasi-synthetic sequence derived from human genome
LKKKAFVWARNIGFKVNSKKMLGKYNTPVSYRMAKTLVFSKVKTSLGL

SEQ ID NO: 40572 - protein, 48 aa, Artificial Sequence
  Quasi-synthetic sequence derived from human genome
NYWLIIRLPILFAIGVNFLIFVRVICIVVSKLKANLMCKTDIKCRLAK

SEQ ID NO: 40573 - protein, 48 aa, Artificial Sequence
  Quasi-synthetic sequence derived from human genome
MAHLKRLVKLHIKRHYHKKFWKLGAVIFFFIIVLVLMQREVSVQYSKE

SEQ ID NO: 40574 - protein, 48 aa, Artificial Sequence
  Quasi-synthetic sequence derived from human genome
MFRKPYVRRRPSKRRGARAFRCIKPAPVIHPASVIFTVPATTVKIVSL

SEQ ID NO: 40575 - protein, 48 aa, Artificial Sequence
  Quasi-synthetic sequence derived from human genome
RISRRLRRPPHVGRARRNSLRIIFAIESTFVGSWLPFSALRAVFHLAR

SEQ ID NO: 40576 - protein, 48 aa, Artificial Sequence
  Quasi-synthetic sequence derived from human genome
VALLWKRLLIARRSRKGFFAQIVLPAVFVCIALVFSLIVPPFGKYPSL

SEQ ID NO: 40577 - protein, 48 aa, Artificial Sequence
  Quasi-synthetic sequence derived from human genome
HQLQLLLWKNVTLKRRSPWVLAFEIFIPLVLFFILLGLRQKKPTISVK

SEQ ID NO: 40578 - protein, 48 aa, Artificial Sequence
  Quasi-synthetic sequence derived from human genome
RRSRWPFSKARSFCKTHASLFKKILLGLLCLAYAAYLLAACILNFQRA

SEQ ID NO: 40579 - protein, 48 aa, Artificial Sequence
  Quasi-synthetic sequence derived from human genome
LWLKNRTLDEYLTCLLLWVKQRRDLLHLCCKKLKILGMPFRNIRSILK

SEQ ID NO: 40580 - protein, 48 aa, Artificial Sequence
  Quasi-synthetic sequence derived from human genome
RIGRILRLIRGAKGIRTLLFALMMSLPALFNIGLLLFLVMFIYSIFGM

SEQ ID NO: 40581 - protein, 48 aa, Artificial Sequence
  Quasi-synthetic sequence derived from human genome
PRSLKHLCRLKIRKCMGRLHLRCPVFMSFLPLPNRLKAYVLYKEYDLY

SEQ ID NO: 40582 - protein, 48 aa, Artificial Sequence
  Quasi-synthetic sequence derived from human genome
FQCCFCQKGFKIQSKLLKHKQIHTRNKAFRALLLKKRRTESRPLPNKL

SEQ ID NO: 40583 - protein, 48 aa, Artificial Sequence
  Quasi-synthetic sequence derived from human genome
RRTRRPRFVLMNKMDDLNLHYRFLNWRRRIREIREVRAFRYQERFKHI

SEQ ID NO: 40584 - protein, 48 aa, Artificial Sequence
  Quasi-synthetic sequence derived from human genome
LCTLRGRRCHCLPFPKRGMQRWMLPLRRGARLLPLASSKNPRARSPGL

SEQ ID NO: 40585 - protein, 48 aa, Artificial Sequence
  Quasi-synthetic sequence derived from human genome
RPKGLKRAASAIYRLFDYRGRLSPVPVPRAVPVKRPRVTVPLVRRVKT

SEQ ID NO: 40586 - protein, 48 aa, Artificial Sequence
  Quasi-synthetic sequence derived from human genome
KSKIFFLFRLCKKLPFNMMSWLNFSIRTEIRNLSVFLALPCKFTSQFR

SEQ ID NO: 40587 - protein, 48 aa, Artificial Sequence
  Quasi-synthetic sequence derived from human genome
ANRPKRLLLVLVSAFFIFWSPFNVVLLVHLWRRVMLKEIYHPRMLLIL

SEQ ID NO: 40588 - protein, 48 aa, Artificial Sequence
  Quasi-synthetic sequence derived from human genome
KVCRGYLVKMGGKIKSWKKRWFVFDRLKRTLSYYVDKHETKLKGVIYF

SEQ ID NO: 40589 - protein, 48 aa, Artificial Sequence
  Quasi-synthetic sequence derived from human genome
RKLLIQAAIVRIMKMRKVLKHQQLLGEVLTQLSSRFKPRVPVIKKCID

SEQ ID NO: 40590 - protein, 48 aa, Artificial Sequence
  Quasi-synthetic sequence derived from human genome
KRVGRRHYCLVEHPQRSKKAVWHKLLSKQRKRAVVACFRMAPLYNLPR

SEQ ID NO: 40591 - protein, 48 aa, Artificial Sequence
  Quasi-synthetic sequence derived from human genome
MIKFASYYAGIAVAVLITGYIQICFWVIAAARQIQKMRKFYFRRIMRM

SEQ ID NO: 40592 - protein, 48 aa, Artificial Sequence
  Quasi-synthetic sequence derived from human genome
RGFLMRVEYQKMLQRREALFCIQYNVRAFMNVKHWPWMKLFFKIKPLL

SEQ ID NO: 40593 - protein, 48 aa, Artificial Sequence
  Quasi-synthetic sequence derived from human genome
GKKKMSKLSRSARAGVIFPVGRLMRYLKKGTFKYRISVGAPVYMAAVI

SEQ ID NO: 40594 - protein, 48 aa, Artificial Sequence
  Quasi-synthetic sequence derived from human genome
GFLLPFLAVVASYSDIGRRLQARRFRRSRRTGRLVVLIILTFAAFWLP

SEQ ID NO: 40595 - protein, 48 aa, Artificial Sequence
  Quasi-synthetic sequence derived from human genome
LYRFLARRTNSTFNQVVLKRLFMSRTNRPPLSLSRMIRKMKLPGRENK

SEQ ID NO: 40596 - protein, 48 aa, Artificial Sequence
  Quasi-synthetic sequence derived from human genome
KKLLNGLCPKITYLFYKLFTLLSWMLSVVLLLFLNVKIALFLLLFLWL

SEQ ID NO: 40597 - protein, 48 aa, Artificial Sequence
  Quasi-synthetic sequence derived from human genome
KVFIKYTKLKKIFLQHNCIRHISRKAFFGLCNLQILYLNHNCITTLRP

SEQ ID NO: 40598 - protein, 48 aa, Artificial Sequence
  Quasi-synthetic sequence derived from human genome
KRRRMVLEFYVQQEWAAVRLQSWVRMWCVRQRYCRLLNAVRIIQVYWR

SEQ ID NO: 40599 - protein, 48 aa, Artificial Sequence
  Quasi-synthetic sequence derived from human genome
IFQGCLYLIYNLLQAVFFVLFVLSVHYLWKKWKKHQKKLKKQASLEKP

SEQ ID NO: 40600 - protein, 48 aa, Artificial Sequence
  Quasi-synthetic sequence derived from human genome
LWLKNRTLDEYLTCLLLWVKQRKDLLHLCCKKLKILGMPFRNIRSILK

SEQ ID NO: 40601 - protein, 48 aa, Artificial Sequence
  Quasi-synthetic sequence derived from human genome
RICSSAPLLYFLFICPFVLLLLLLISLLCLYWKARKLSTLRSNTRKEK

SEQ ID NO: 40602 - protein, 48 aa, Artificial Sequence
  Quasi-synthetic sequence derived from human genome
IFLYLKWRVKKVVLVLLLVTSVFLFLNIALINIHINASINGYRRNKTC

SEQ ID NO: 40603 - protein, 48 aa, Artificial Sequence
  Quasi-synthetic sequence derived from human genome
FYRNHKTFMVLNRKRTIYRFSAKHALFIFGPFNSIRSLAIRVSVHSLF

SEQ ID NO: 40604 - protein, 48 aa, Artificial Sequence
  Quasi-synthetic sequence derived from human genome
LARSFALLLPVYALGYLGLSFSWVLLALALLAWCRRSRGLKALRLCRA

SEQ ID NO: 40605 - protein, 48 aa, Artificial Sequence
  Quasi-synthetic sequence derived from human genome
FGVFLPLSMLITVIIDNFNKHKIKLGGSNIFITVKQRKQYRRLKKLMY

SEQ ID NO: 40606 - protein, 48 aa, Artificial Sequence
  Quasi-synthetic sequence derived from human genome
LINWFICSLCVPRVRKLWSSRRPRTRRNLLLGTACAIYLGFLVSQVGR

SEQ ID NO: 40607 - protein, 48 aa, Artificial Sequence
  Quasi-synthetic sequence derived from human genome
MNRLRNAKIYVERAVKQKKIFTIQGCYPVIRCLLRRRGWVEKKMVHRS

SEQ ID NO: 40608 - protein, 48 aa, Artificial Sequence
  Quasi-synthetic sequence derived from human genome
VHLCCSKLVNYLTPIKHLRKSLKIIYLNSIQQLEIRNMSWPRLIRKLR

SEQ ID NO: 40609 - protein, 48 aa, Artificial Sequence
  Quasi-synthetic sequence derived from human genome
FFKGGRCWRFRGPKPVWGLPQLCRAGGLPRHPDAALFFPPLRRLILFK

SEQ ID NO: 40610 - protein, 48 aa, Artificial Sequence
  Quasi-synthetic sequence derived from human genome
VVRSSVHARWIVGKVIGTKMQKTAKVRVTRLVLDPYLLKYFNKRKTYF

SEQ ID NO: 40611 - protein, 48 aa, Artificial Sequence
  Quasi-synthetic sequence derived from human genome
VVSAQKKLPVRRPPLPGRRLPLPGRRPPQRPIGKAKPKKQSKKKVPFW

SEQ ID NO: 40612 - protein, 48 aa, Artificial Sequence
  Quasi-synthetic sequence derived from human genome
WRGYRERKNFHQQRQSLIEYKAAVTLQRAALKFLAKCRKKKKLFAPWR

SEQ ID NO: 40613 - protein, 48 aa, Artificial Sequence
  Quasi-synthetic sequence derived from human genome
KILRVLRVLRPLRAINRAKGLKHVVQCMFVAISTIGNIVLVTTLLQFM

SEQ ID NO: 40614 - protein, 48 aa, Artificial Sequence
  Quasi-synthetic sequence derived from human genome
LKIKLAVRMDKPQNMKHSGYLWAIGKNVWKRWKKRFFVLVQVSQYTFA

SEQ ID NO: 40615 - protein, 48 aa, Artificial Sequence
  Quasi-synthetic sequence derived from human genome
TIIRIMRVLRIARVLKLLKMAVGMRALLDTVGNLGLLFMLLFFIFAAL

SEQ ID NO: 40616 - protein, 48 aa, Artificial Sequence
  Quasi-synthetic sequence derived from human genome
KLRWLGLHTFIRHKRTMVKTSVLVVQFVEAIVVLVRQMSHVRVTRALR

SEQ ID NO: 40617 - protein, 48 aa, Artificial Sequence
  Quasi-synthetic sequence derived from human genome
MRKRKISVCQQTWALLCKNFLKKWRMKRESLMEWLNSLLLLLCLYIYP

SEQ ID NO: 40618 - protein, 48 aa, Artificial Sequence
  Quasi-synthetic sequence derived from human genome
FHFNRYLTRRRRIEIAHALCLSERQIKIWFQNRRMKWKKDNKLKSMSL

SEQ ID NO: 40619 - protein, 48 aa, Artificial Sequence
  Quasi-synthetic sequence derived from human genome
FLVPVLIITACYLTIVCKLQRNRLAKTKKPFKIIVTIIITFFLCWCPY

SEQ ID NO: 40620 - protein, 48 aa, Artificial Sequence
  Quasi-synthetic sequence derived from human genome
FRTHHTGLLSVLAMFFLLVLILSSVFLFRLFKRRQGRIFPEGKMWKLT

SEQ ID NO: 40621 - protein, 48 aa, Artificial Sequence
  Quasi-synthetic sequence derived from human genome
VLRCVRLLRIFKVTRHWASLSNLVASLLNSMKSIASLLLLLFLFIIIF

SEQ ID NO: 40622 - protein, 48 aa, Artificial Sequence
  Quasi-synthetic sequence derived from human genome
LLLAFLQRRQRRRQDSRVVARSVRILVASFFLCWFPNHVVTLWGVLVK

SEQ ID NO: 40623 - protein, 48 aa, Artificial Sequence
  Quasi-synthetic sequence derived from human genome
RRIVVSRGRLRRLLWIGFTLTAVALILWQCALLVFSFYTVSVSIKVHF

SEQ ID NO: 40624 - protein, 48 aa, Artificial Sequence
  Quasi-synthetic sequence derived from human genome
QGKASQCGKYLKVFYKFINLNRYKIRHTRKKPFKCKNCVKSFCMFSHK

SEQ ID NO: 40625 - protein, 48 aa, Artificial Sequence
  Quasi-synthetic sequence derived from human genome
IVMLCGLLKMWEDLRLRVHGPFFPRILRRRKGKREFGKTITHIVAKMM

SEQ ID NO: 40626 - protein, 48 aa, Artificial Sequence
  Quasi-synthetic sequence derived from human genome
LLLIPKFARWFSVPWKVIFVFALLAFLFFTSWYSSYGFTRRWNCILMR

SEQ ID NO: 40627 - protein, 48 aa, Artificial Sequence
  Quasi-synthetic sequence derived from human genome
LRLDKLRQSCVMVQKHMRGWLQRKKFLRERRAALIIQQYFRGQQTVRK

SEQ ID NO: 40628 - protein, 48 aa, Artificial Sequence
  Quasi-synthetic sequence derived from human genome
KILGMLRVLRLLRTLRPLRVISRAQGLKLVVETLMSSLKPIGNIVVIC

SEQ ID NO: 40629 - protein, 48 aa, Artificial Sequence
  Quasi-synthetic sequence derived from human genome
LKMNISVLVLPLFIFTFLYVQMRKTLRFREQRYSLFKLVFAIMVVFLL

SEQ ID NO: 40630 - protein, 48 aa, Artificial Sequence
  Quasi-synthetic sequence derived from human genome
QKGWIRCNTTIRKSGFGGITMLFTGYFVLCCSWSFRRLKKLCRPLPWK

SEQ ID NO: 40631 - protein, 48 aa, Artificial Sequence
  Quasi-synthetic sequence derived from human genome
LLGRLLIYKQGRKLFPIKLKNKKGLVSLIDLLVLFTQLIYYSPSCPKM

SEQ ID NO: 40632 - protein, 48 aa, Artificial Sequence
  Quasi-synthetic sequence derived from human genome
AKVQRIFTRRSKKLAVVHFFDHASAALARKKGKSLHKDMAIFWHRKKI

SEQ ID NO: 40633 - protein, 48 aa, Artificial Sequence
  Quasi-synthetic sequence derived from human genome
KKRILFLYNDLLKKRAAFTKLRRAAILRRERQQKAPVFTEPQFLPLKN

SEQ ID NO: 40634 - protein, 48 aa, Artificial Sequence
  Quasi-synthetic sequence derived from human genome
IRAIRNFHTSPRFQAAPVPLLLMILKPVQKLFAIIVGRGIRKWWQALP

SEQ ID NO: 40635 - protein, 48 aa, Artificial Sequence
  Quasi-synthetic sequence derived from human genome
RRLQTQVFKLGLAKSIHHARVLIRQRHIRVRKQVVNIPSFIVRLDSQK

SEQ ID NO: 40636 - protein, 48 aa, Artificial Sequence
  Quasi-synthetic sequence derived from human genome
RGFLMRVEFQKMVQRRESIFCIQYNIRSFMNVKHWPWMKLFFKIKPLL

SEQ ID NO: 40637 - protein, 48 aa, Artificial Sequence
  Quasi-synthetic sequence derived from human genome
VRKSIARVLTVINQTQKENLRKFYKGKKYKPLDLRPKKTRAMRRRLNK

SEQ ID NO: 40638 - protein, 48 aa, Artificial Sequence
  Quasi-synthetic sequence derived from human genome
VLGLLLTEIVRSWSLALTWALNYRTGVRLRGAILTMAFKKILKLKNIK

SEQ ID NO: 40639 - protein, 48 aa, Artificial Sequence
  Quasi-synthetic sequence derived from human genome
RIGRVLRLIRGAKGIRTLLFALMMSLPALFNIGLLLFLVMFIYSIFGM

SEQ ID NO: 40640 - protein, 48 aa, Artificial Sequence
  Quasi-synthetic sequence derived from human genome
CKFVRFLFYWNLYCSVLFLTCISVHRYLGICHPLRALRWGRPRLAGLL

SEQ ID NO: 40641 - protein, 48 aa, Artificial Sequence
  Quasi-synthetic sequence derived from human genome
IHLFRKPQRSFFGKLLREFRLVAADRRSWKILLFGVINLICTGFLLMW

SEQ ID NO: 40642 - protein, 48 aa, Artificial Sequence
  Quasi-synthetic sequence derived from human genome
RPFTRFRTAVRVVIAILRLRFLVKKWQEVDRKGALAQGKAPRPGPRAR

SEQ ID NO: 40643 - protein, 48 aa, Artificial Sequence
  Quasi-synthetic sequence derived from human genome
GKCALVRHKFNRLPRVLILHLKRYSFNVALSLNNKIGQQVIIPRYLTL

SEQ ID NO: 40644 - protein, 48 aa, Artificial Sequence
  Quasi-synthetic sequence derived from human genome
KFKGRSILLKTLCKLVDVGSDSLSLKLAKIILALKVSRKNLLNVCKLI

SEQ ID NO: 40645 - protein, 48 aa, Artificial Sequence
  Quasi-synthetic sequence derived from human genome
CRGKDPTRRELSLGRKKAPHRLCGRFSRISMKLPRIPLRRQKLPKVVV

SEQ ID NO: 40646 - protein, 48 aa, Artificial Sequence
  Quasi-synthetic sequence derived from human genome
QFILNLFSFLLRIKTSLLHEEVSLVEKKLFEKKYSVKRKKSRSKKVRR

SEQ ID NO: 40647 - protein, 48 aa, Artificial Sequence
  Quasi-synthetic sequence derived from human genome
GKFLYFLRSRVPGLPPTPVQLLYPVSRFSNVKSLQHLCRFRIRQLVRI

SEQ ID NO: 40648 - protein, 48 aa, Artificial Sequence
  Quasi-synthetic sequence derived from human genome
AGRLFCVFYGLFGVPLCLTWISALGKFFGGRAKRLGQFLTKRGVSLRK

SEQ ID NO: 40649 - protein, 48 aa, Artificial Sequence
  Quasi-synthetic sequence derived from human genome
MCFLRRPGAPASWIWWRMLRQVLRRGLQSFCHRLGLCVSRHPVFFLTV

SEQ ID NO: 40650 - protein, 48 aa, Artificial Sequence
  Quasi-synthetic sequence derived from human genome
RYFSITRPLTYRAKRTPKRAGIMIGLAWLISFILWAPAILCWQYLVGK

SEQ ID NO: 40651 - protein, 48 aa, Artificial Sequence
  Quasi-synthetic sequence derived from human genome
KTPSQKRYVAYFAQVKHLYNWNLPPRRILFIKHFIIYSIPRYVRDLKI

SEQ ID NO: 40652 - protein, 48 aa, Artificial Sequence
  Quasi-synthetic sequence derived from human genome
RLQRKAVISLQSYFRMRKARQYYLKMYKAIIVIQNYYHAYKAQVNQRK

SEQ ID NO: 40653 - protein, 48 aa, Artificial Sequence
  Quasi-synthetic sequence derived from human genome
RKRRRQLRASVFALALPLSLGPCWALWVAVPKASATIRGPQRRLLASL

SEQ ID NO: 40654 - protein, 48 aa, Artificial Sequence
  Quasi-synthetic sequence derived from human genome
RTYRCAHPLATLFKILASFYISLVIFYGLICMYTLWWMLRRSLKKYSF

SEQ ID NO: 40655 - protein, 48 aa, Artificial Sequence
  Quasi-synthetic sequence derived from human genome
LPWRAKMSRGNSKQRKLKINPKRYKGNFLQSCVQLRASRLRTPTWVRR

SEQ ID NO: 40656 - protein, 48 aa, Artificial Sequence
  Quasi-synthetic sequence derived from human genome
RRLRAIYTIMRWFRRHKVRAHLAELQRRFQAARQPPLYGRDLVWPLPP

SEQ ID NO: 40657 - protein, 48 aa, Artificial Sequence
  Quasi-synthetic sequence derived from human genome
IFVFFRKLTTIFPLNWKYRKALSLGCQRVTLHKNMFLTYILNSMIIII

SEQ ID NO: 40658 - protein, 48 aa, Artificial Sequence
  Quasi-synthetic sequence derived from human genome
RGVLARMEYKKLLERRDSLLVIQWNIRAFMGVKNWPWMKLYFKIKPLL

SEQ ID NO: 40659 - protein, 48 aa, Artificial Sequence
  Quasi-synthetic sequence derived from human genome
VIPLKVISRGRSAKAPGWLSYSLRFGGQKHVVHMRVKKLLVSRHLPVF

SEQ ID NO: 40660 - protein, 48 aa, Artificial Sequence
  Quasi-synthetic sequence derived from human genome
PVRRRRRRPGGRVPKDRPSLTVTPKRWKLRARPSLTVTPRRLGLRARP

SEQ ID NO: 40661 - protein, 48 aa, Artificial Sequence
  Quasi-synthetic sequence derived from human genome
LLLQTKNSSKVLFRKSEKYMKLFLWLLVGVGLLGLGLRHKAYERKLGK

SEQ ID NO: 40662 - protein, 48 aa, Artificial Sequence
  Quasi-synthetic sequence derived from human genome
LAARRQEQRATVRALWFWAFSLQAKVWATWLAFVLERRRKKARLQWAL

SEQ ID NO: 40663 - protein, 48 aa, Artificial Sequence
  Quasi-synthetic sequence derived from human genome
IVTANPWNTIALLCGAFLALFKAAEFAKLSIKWMIKIRKRYLKRRGQA

SEQ ID NO: 40664 - protein, 48 aa, Artificial Sequence
  Quasi-synthetic sequence derived from human genome
LLWIDAKVAARMVWRLLHGQVLTRRERRRLLRTCVDFFRLVPFMVFLI

SEQ ID NO: 40665 - protein, 48 aa, Artificial Sequence
  Quasi-synthetic sequence derived from human genome
KVLLYMAFMTIMIKVHTFPLFAIRPMYLAMRQFKKAVTDAIMSRRAIR

SEQ ID NO: 40666 - protein, 48 aa, Artificial Sequence
  Quasi-synthetic sequence derived from human genome
KYYRSYKKCGKRRQARRTAVIVQQKLRSSLLTKKQDQAARKIMRFLRR

SEQ ID NO: 40667 - protein, 48 aa, Artificial Sequence
  Quasi-synthetic sequence derived from human genome
QLLLILRGQTRHQVRKGVAVRARPWRKNLQEVFGKRWLLGLLVPMFNV

SEQ ID NO: 40668 - protein, 48 aa, Artificial Sequence
  Quasi-synthetic sequence derived from human genome
MANSRFSCTQIWVKMYGYFAGLCRRLQKFWRVTVKGFFVKKKEKKIPS

SEQ ID NO: 40669 - protein, 48 aa, Artificial Sequence
  Quasi-synthetic sequence derived from human genome
VKRIGPHIEIFQVFRERKKFMITPKLIRMVTVMQAHVRGWLERKRLQR

SEQ ID NO: 40670 - protein, 48 aa, Artificial Sequence
  Quasi-synthetic sequence derived from human genome
RKVYIQTRRQRKLHFVVGGFAYLLPKTAVVLRCPARRVRKPLITWEKD

SEQ ID NO: 40671 - protein, 48 aa, Artificial Sequence
  Quasi-synthetic sequence derived from human genome
RGFLMRVEFRKMMERRESIFCIQYNIRAFMNVKHWPWMKLYFKIKPLL

SEQ ID NO: 40672 - protein, 48 aa, Artificial Sequence
  Quasi-synthetic sequence derived from human genome
PRAHRAYLTLLFATSIAGPGLLIGLLYARLARAYRRSQRASFKRARRP

SEQ ID NO: 40673 - protein, 48 aa, Artificial Sequence
  Quasi-synthetic sequence derived from human genome
GFAGLLAILLVVAVFCILWNWNKRKKRQVPYLRVTVMPLLTLPQTRQR

SEQ ID NO: 40674 - protein, 48 aa, Artificial Sequence
  Quasi-synthetic sequence derived from human genome
RPHLPGKKKIRWDPVRRRFIQSCPIIRIPNRFLRGHRPPPARSGHRCV

SEQ ID NO: 40675 - protein, 48 aa, Artificial Sequence
  Quasi-synthetic sequence derived from human genome
FLAELIEKYFVSPTLFRVIRLARIGRILRLIKGAKGIRTLLFALMMSL

SEQ ID NO: 40676 - protein, 48 aa, Artificial Sequence
  Quasi-synthetic sequence derived from human genome
VFRCVRLLRIFKVTRHWTSLSNLVASLLNSMKSIASLLLLLFLFIIIF

SEQ ID NO: 40677 - protein, 48 aa, Artificial Sequence
  Quasi-synthetic sequence derived from human genome
FILYTVRTKVFQSEASKVLMLLSSIGRRKSLPSVTRPRLRVKMYNFLR

SEQ ID NO: 40678 - protein, 48 aa, Artificial Sequence
  Quasi-synthetic sequence derived from human genome
RLASLNQILDPWVYLLLRKILLRKFCQMRKRRLREQLICSLQNSQIQR

SEQ ID NO: 40679 - protein, 48 aa, Artificial Sequence
  Quasi-synthetic sequence derived from human genome
SSHKTFTIKRFLAKKQKQNRPIPQWIQMKPGSKIRYNSKRRHWRRTKL

SEQ ID NO: 40680 - protein, 48 aa, Artificial Sequence
  Quasi-synthetic sequence derived from human genome
YVKVFHKLLNSNRHNTKHTGKKPFKCKKCGKSFCMLLHLCQHKRIHIR

SEQ ID NO: 40681 - protein, 48 aa, Artificial Sequence
  Quasi-synthetic sequence derived from human genome
KLKNAYVLYYLAIVGHSLSIFTLVISLGIFVFFRKLTTIFPLNWKYRK

SEQ ID NO: 40682 - protein, 48 aa, Artificial Sequence
  Quasi-synthetic sequence derived from human genome
VYGTVTLKLHRVLKVFLSRTAQRIPYMTGGRVMRMLAVILLVVFWFLI

SEQ ID NO: 40683 - protein, 48 aa, Artificial Sequence
  Quasi-synthetic sequence derived from human genome
RRFSPPRRMLPPPPMWRRSPPRMRRRSRSPRRRSPVRRRSRSPGRRRH

SEQ ID NO: 40684 - protein, 48 aa, Artificial Sequence
  Quasi-synthetic sequence derived from human genome
LWLKNRTLDEHLTCLLLWVKQRKDLLHLCCKKLKILGMPFRNIRSILK

SEQ ID NO: 40685 - protein, 48 aa, Artificial Sequence
  Quasi-synthetic sequence derived from human genome
FGFKVAVIASIVSCAIILLMSMAFLTCCLLKCVKKSKRRRSNRSAQLW

SEQ ID NO: 40686 - protein, 48 aa, Artificial Sequence
  Quasi-synthetic sequence derived from human genome
TLTRPFSGRRLPVRAWADVRRESRLLQLLGRLPLFGLGRLVTRKSWLW

SEQ ID NO: 40687 - protein, 48 aa, Artificial Sequence
  Quasi-synthetic sequence derived from human genome
SKFSRYWRRWNRFCRRKCRAAVKSNVFYWLVIFLVFLNTLTIASEHYN

SEQ ID NO: 40688 - protein, 48 aa, Artificial Sequence
  Quasi-synthetic sequence derived from human genome
FVIQLQARLRGFLVRQKFAEHSHFLRTWLPAVIKIQAHWRGYRQRKIY

SEQ ID NO: 40689 - protein, 48 aa, Artificial Sequence
  Quasi-synthetic sequence derived from human genome
ILKAVKVLQASFRGVRVRRTLRKMQTAATLIQSNYRRYRQQTYFNKLK

SEQ ID NO: 40690 - protein, 48 aa, Artificial Sequence
  Quasi-synthetic sequence derived from human genome
YRRKPTCKKIMTVLTVGIFWPVLSLCYLIAPKSQFGRIIHTPFMKFII

SEQ ID NO: 40691 - protein, 48 aa, Artificial Sequence
  Quasi-synthetic sequence derived from human genome
EWRAYRDKLKFWTHCVLATLIMFTIFSFFAEQLIALKRKIFPRRRIHK

SEQ ID NO: 40692 - protein, 48 aa, Artificial Sequence
  Quasi-synthetic sequence derived from human genome
ARLFFGPQHRPVILRLPNRRALRLRASFSQPLFQAVAAICRLLSIRHP

SEQ ID NO: 40693 - protein, 48 aa, Artificial Sequence
  Quasi-synthetic sequence derived from human genome
KATKRCKKLEAVYKEFELQKVCYLPLNTFLLKPIQRLLHYRLLLRRLC

SEQ ID NO: 40694 - protein, 48 aa, Artificial Sequence
  Quasi-synthetic sequence derived from human genome
ILALVLLVVLLVVCGPLAYKKLVKKFRQKKQRQWIGPTGMNQNMSFHR

SEQ ID NO: 40695 - protein, 48 aa, Artificial Sequence
  Quasi-synthetic sequence derived from human genome
RRALLRAVFVLRQGLACLQRLHVAWFYIHGVFYHLAKRLTGITYQALR

SEQ ID NO: 40696 - protein, 48 aa, Artificial Sequence
  Quasi-synthetic sequence derived from human genome
RRCGRPRRRDPRRRRTPALPRPWPGRGGPGRSLLHRHLFIQQLLRTCW

SEQ ID NO: 40697 - protein, 48 aa, Artificial Sequence
  Quasi-synthetic sequence derived from human genome
FLADIIEKYFVSPTLFRVIRLARIGRILRLIKGAKGIRTLLFALMMSL

SEQ ID NO: 40698 - protein, 48 aa, Artificial Sequence
  Quasi-synthetic sequence derived from human genome
IRIMRVLRIARVLKLLKMAVGMRALLDTVGNLGLLFMLLFFIFAALGV

SEQ ID NO: 40699 - protein, 48 aa, Artificial Sequence
  Quasi-synthetic sequence derived from human genome
KRWREELKRTGAPGAFHRWKVVLLVRTDKRSDSLIRKKFRMMKIPKPI

SEQ ID NO: 40700 - protein, 48 aa, Artificial Sequence
  Quasi-synthetic sequence derived from human genome
GNFRGHALPGTFFFIIGLWWCTKSILKYICKKQKRTCYLGSKTLFYRL

SEQ ID NO: 40701 - protein, 48 aa, Artificial Sequence
  Quasi-synthetic sequence derived from human genome
RVFMPLQAQVKAKASKPLQMQIKAPPRLRRAARVLMPLQAQVRAPRLL

SEQ ID NO: 40702 - protein, 48 aa, Artificial Sequence
  Quasi-synthetic sequence derived from human genome
CRLIPATLYPGRVILSLDFILFCLRLMHIFTISKTLGPKIIIVKRMMK

SEQ ID NO: 40703 - protein, 48 aa, Artificial Sequence
  Quasi-synthetic sequence derived from human genome
FVIRIRGINGVSPKVRKVLQLLRLRQIFNGTFVKLNKASINMLRIVEP

SEQ ID NO: 40704 - protein, 48 aa, Artificial Sequence
  Quasi-synthetic sequence derived from human genome
FSSWLATSLSMFYLLRIANFSNLIFLRIKRRVKSVVLVILLGPLLFLV

SEQ ID NO: 40705 - protein, 48 aa, Artificial Sequence
  Quasi-synthetic sequence derived from human genome
ACASVKRNVTDFLKRATLKNLRKQYRNVKKMTAKELVKVLFSFFWMLF

SEQ ID NO: 40706 - protein, 48 aa, Artificial Sequence
  Quasi-synthetic sequence derived from human genome
RQVALAVSKFLLAFLVPLAIIASSHAAVSLRLQHRGRRRPGRFVRLVA

SEQ ID NO: 40707 - protein, 48 aa, Artificial Sequence
  Quasi-synthetic sequence derived from human genome
TRWARPFYLAFVFCLALGLLQAIKLYLRRQRLLRDLRPFPAPPTHWFL

SEQ ID NO: 40708 - protein, 48 aa, Artificial Sequence
  Quasi-synthetic sequence derived from human genome
RRKESKRTNKWQKMLADWTKYRSTKKLSQRVYKVIPLAVRGRAWSLLL

SEQ ID NO: 40709 - protein, 48 aa, Artificial Sequence
  Quasi-synthetic sequence derived from human genome
IIVYKLRRKSNFRLRGYSTGKTTAILFTITSIFATLWAPRIIMILYHL

SEQ ID NO: 40710 - protein, 48 aa, Artificial Sequence
  Quasi-synthetic sequence derived from human genome
KFFGGRAKRLGQFLTKRGVSLRKAQITCTVIFIVWGVLVHLVIPPFVF

SEQ ID NO: 40711 - protein, 48 aa, Artificial Sequence
  Quasi-synthetic sequence derived from human genome
VRLGRKRPLPACPNPLFVRWLTEWRDEATRSRRRTRFVFQKALRSLRR

SEQ ID NO: 40712 - protein, 48 aa, Artificial Sequence
  Quasi-synthetic sequence derived from human genome
QRFTKITQYLIRIRKLTLKRQRKLVPLSKKVERREKRREEKALIAAQL

SEQ ID NO: 40713 - protein, 48 aa, Artificial Sequence
  Quasi-synthetic sequence derived from human genome
QSKVFQCDKYLKVFYKFLNSNRPKIRHTEKKSFKCKKRVKLFCMLSHK

SEQ ID NO: 40714 - protein, 48 aa, Artificial Sequence
  Quasi-synthetic sequence derived from human genome
AIFLLIFQSILGVIINSFMCGAILAKISRPKKRAKTITFSKNAVISKR

SEQ ID NO: 40715 - protein, 48 aa, Artificial Sequence
  Quasi-synthetic sequence derived from human genome
ARKIVKMTKQPAKKKPPPSREKKVTRTILAILLAFIITWAPYNVMVLI

SEQ ID NO: 40716 - protein, 48 aa, Artificial Sequence
  Quasi-synthetic sequence derived from human genome
LGSWALFFRRPKASLPRVFVLRALLMVLVFLLVVSYWLFYGVRILDAR

SEQ ID NO: 40717 - protein, 48 aa, Artificial Sequence
  Quasi-synthetic sequence derived from human genome
KALRAFRVLRPLRLVSGVPSLHIVLNSIMKALVPLLHIALLVLFVIII

SEQ ID NO: 40718 - protein, 48 aa, Artificial Sequence
  Quasi-synthetic sequence derived from human genome
WKIKLRNAIHLSSLTVTTLANLIPFTLSLICFLLLICSLCKHLKKMRL

SEQ ID NO: 40719 - protein, 48 aa, Artificial Sequence
  Quasi-synthetic sequence derived from human genome
RFMLLFSRQGKLRLQKWYLATSDKERKKMVRELMQVVLARKPKMCSFL

SEQ ID NO: 40720 - protein, 48 aa, Artificial Sequence
  Quasi-synthetic sequence derived from human genome
LLQQMRYPIWLITPQTYLIIWVITNCVSTMLLLWTFLLQRRFVKKRGK

SEQ ID NO: 40721 - protein, 48 aa, Artificial Sequence
  Quasi-synthetic sequence derived from human genome
FSIWLATSLSIFYLLKIVNFSRLIFHHLKRKAKSVVLVIVLGSLFFLV

SEQ ID NO: 40722 - protein, 48 aa, Artificial Sequence
  Quasi-synthetic sequence derived from human genome
KQLFLKAQKIVHKLFSLSKRCHKQPLISLPRQRTSTYWLTRIQSFLYC

SEQ ID NO: 40723 - protein, 48 aa, Artificial Sequence
  Quasi-synthetic sequence derived from human genome
IRKRLRCRRKTVLVLMCILTAYVLCWAPFYGFTIVRDFFPTVFVKEKH

SEQ ID NO: 40724 - protein, 48 aa, Artificial Sequence
  Quasi-synthetic sequence derived from human genome
GRSLPVKITVYRRSSLYIILSTGGIFLLVTLVTVCACWKPSKRKQKKL

SEQ ID NO: 40725 - protein, 48 aa, Artificial Sequence
  Quasi-synthetic sequence derived from human genome
MRLKKHRWYKKILKSRDPIIFSVGWRRFQTIPLYYIEDHNGRQRLLKY

SEQ ID NO: 40726 - protein, 48 aa, Artificial Sequence
  Quasi-synthetic sequence derived from human genome
VKKAKAKSRIKMKKARKILAEKRAAAPVVSVPCIPPHRLSKITNRLTI

SEQ ID NO: 40727 - protein, 48 aa, Artificial Sequence
  Quasi-synthetic sequence derived from human genome
RCPHCRKVSSIGRRYPRKRCICCFLLGLLLAVTATGLAFGTWKHARRY

SEQ ID NO: 40728 - protein, 48 aa, Artificial Sequence
  Quasi-synthetic sequence derived from human genome
SLAFKSYKPEIQNKLLIIKKKAKHKKHKSGKKSVSKKAITKKRKTVIK

SEQ ID NO: 40729 - protein, 48 aa, Artificial Sequence
  Quasi-synthetic sequence derived from human genome
TQKSLVYGLVGAGVVLMLIILVALLMLVFRSKREVKRQKYRLSQLYKW

SEQ ID NO: 40730 - protein, 48 aa, Artificial Sequence
  Quasi-synthetic sequence derived from human genome
SNKSVLQFQNVRRVVQIFRIMRILRILKLARHSTGLQSLGFTLRRSYN

SEQ ID NO: 40731 - protein, 48 aa, Artificial Sequence
  Quasi-synthetic sequence derived from human genome
KFIRIFQLSNNIRSVVLRHCKKRQSHLRLTLKNNVFLFIDKLSYRDAK

SEQ ID NO: 40732 - protein, 48 aa, Artificial Sequence
  Quasi-synthetic sequence derived from human genome
QRLSKKLRRKLQMWLWSQTFCPVLYAWNDLGSRFWPRYVKVGSCFSKR

SEQ ID NO: 40733 - protein, 48 aa, Artificial Sequence
  Quasi-synthetic sequence derived from human genome
FKTCKEYLRPLKKFLRKLHLPRDLPQKKKLKYMKQSLVVLGDHINTFL

SEQ ID NO: 40734 - protein, 48 aa, Artificial Sequence
  Quasi-synthetic sequence derived from human genome
LKLYFAQERNMNFTREQSRHPAWWFMSVKVKLKRKKRQKTPNRKLPRR

SEQ ID NO: 40735 - protein, 48 aa, Artificial Sequence
  Quasi-synthetic sequence derived from human genome
RSKIFIRNPRTLFKLEDLRKQRLEDLATLIQKIYRGWKCRTHFLLMKK

SEQ ID NO: 40736 - protein, 48 aa, Artificial Sequence
  Quasi-synthetic sequence derived from human genome
LRFKRTHIKMKKQPKGYGLRCHRAIITICRLIGIKDMYAKVSGSINML

SEQ ID NO: 40737 - protein, 48 aa, Artificial Sequence
  Quasi-synthetic sequence derived from human genome
ILRLKSVRMLSGSKEKDRNLRRITRMVLVVVAVFIVCWTPIHIYVIIK

SEQ ID NO: 40738 - protein, 48 aa, Artificial Sequence
  Quasi-synthetic sequence derived from human genome
FRKERIEGLRKRRRLLSIIVVLVVTFALCWMPYHLVKTLYMLGSLLHW

SEQ ID NO: 40739 - protein, 48 aa, Artificial Sequence
  Quasi-synthetic sequence derived from human genome
RYLALVHPLRARALRGRRLALGLCMAAWLMAAALALPLTLQRQTFRLA

SEQ ID NO: 40740 - protein, 48 aa, Artificial Sequence
  Quasi-synthetic sequence derived from human genome
RYCCKLNKKLKSYSLSRKKIVHYTCFDQRKRANAAFLIGAYAVIYLKK

SEQ ID NO: 40741 - protein, 48 aa, Artificial Sequence
  Quasi-synthetic sequence derived from human genome
CLKQVFPKYAKQFNYLRLVDRMANLFIRFLGIKGTMKLGPTGFRTFIR

SEQ ID NO: 40742 - protein, 48 aa, Artificial Sequence
  Quasi-synthetic sequence derived from human genome
SRLSLKLLRAFMWSLVFSVALVAAAVYGCIALTHVLCRPRRGCCGRRR

SEQ ID NO: 40743 - protein, 48 aa, Artificial Sequence
  Quasi-synthetic sequence derived from human genome
KRSWPFLRSFRVLRVFKLAKSWPTLNTLIKIIGNSVGALGSLTVVLVI

SEQ ID NO: 40744 - protein, 48 aa, Artificial Sequence
  Quasi-synthetic sequence derived from human genome
VKSIVEKKPRTFIIKLIKWLMIAIPATFVNSAIRYLECKLALAFRTRL

SEQ ID NO: 40745 - protein, 48 aa, Artificial Sequence
  Quasi-synthetic sequence derived from human genome
RLRVKAVTKIREFILQKIYSFRKPMTNYQIPQTALLKYRFFYQFLLGN

SEQ ID NO: 40746 - protein, 48 aa, Artificial Sequence
  Quasi-synthetic sequence derived from human genome
AARVLQEAWMFYKHTRRKESHAARRHQRKLLAAINAFRQVRLKHRKLR

SEQ ID NO: 40747 - protein, 48 aa, Artificial Sequence
  Quasi-synthetic sequence derived from human genome
EVVKMRKEVKRIRVLVIRKLVRSVGRLKSKKGTEDALLKNQRRAQRLL

SEQ ID NO: 40748 - protein, 48 aa, Artificial Sequence
  Quasi-synthetic sequence derived from human genome
VVRFVRILRIFKLTRHFVGLRVLGHTLRASTNEFLLLIIFLALGVLIF

SEQ ID NO: 40749 - protein, 48 aa, Artificial Sequence
  Quasi-synthetic sequence derived from human genome
PPPRLLPRNTFSRKAFKLKKPSKYCSWKCAALSAIAAALLLAILLAYF

SEQ ID NO: 40750 - protein, 48 aa, Artificial Sequence
  Quasi-synthetic sequence derived from human genome
VAVFCILWNWNKRKKRQVPYLRVTVMPLLTLPQTRQRAKNIYDILPWR

SEQ ID NO: 40751 - protein, 48 aa, Artificial Sequence
  Quasi-synthetic sequence derived from human genome
AKQPAKKKRKKGLRIKGKRRRKKLILAKKFSKDLGSGRPVADAPALLA

SEQ ID NO: 40752 - protein, 48 aa, Artificial Sequence
  Quasi-synthetic sequence derived from human genome
IGTWALFFRKRRADMPRVFVFRALLLVLIFLFVVSYWLFYGVRILDSR

SEQ ID NO: 40753 - protein, 48 aa, Artificial Sequence
  Quasi-synthetic sequence derived from human genome
AISLCARVRKLRSAGRCGKFHQVRRVMTILFLTMVISYFGCMKAAPMK

SEQ ID NO: 40754 - protein, 48 aa, Artificial Sequence
  Quasi-synthetic sequence derived from human genome
KVRKRIKDCNKAAVTIQSKYRAYKTKKKYATYRASAIIIQRWYRGIKI

SEQ ID NO: 40755 - protein, 48 aa, Artificial Sequence
  Quasi-synthetic sequence derived from human genome
FNMGQIVLAKKMLRKALKLLNRIFPYNLISLFLHIHVEKNRHFHYVNR

SEQ ID NO: 40756 - protein, 48 aa, Artificial Sequence
  Quasi-synthetic sequence derived from human genome
LRVLRLLRTLRPLRVISRAPGLKLVVETLISSLRPIGNIVLICCAFFI

SEQ ID NO: 40757 - protein, 48 aa, Artificial Sequence
  Quasi-synthetic sequence derived from human genome
VLRVLRALRILYVMRLARHSLGLQTLGLTARRCTREFGLLLLFLCVAI

SEQ ID NO: 40758 - protein, 48 aa, Artificial Sequence
  Quasi-synthetic sequence derived from human genome
YVKIRSRKLGIFRRCWLVFKKASSKGPRRLEKFPDEKAAYFRNFHKVT

SEQ ID NO: 40759 - protein, 48 aa, Artificial Sequence
  Quasi-synthetic sequence derived from human genome
IPVAIFYTLVIPLLNPFIYSLRNKEVINIMKKIMKKRKFCHILKQMSS

SEQ ID NO: 40760 - protein, 48 aa, Artificial Sequence
  Quasi-synthetic sequence derived from human genome
RVPGRGAPISALLSILSFLILYFSHCMIKVFLSSLKFHIRRFIFLFFI

SEQ ID NO: 40761 - protein, 48 aa, Artificial Sequence
  Quasi-synthetic sequence derived from human genome
LLLVALSALFLGRWLVVRLATKWCQRKLQAELKIGSFRFFWIQNVSLK

SEQ ID NO: 40762 - protein, 48 aa, Artificial Sequence
  Quasi-synthetic sequence derived from human genome
RVFRGRFQGRAAVIKHRFPKGYRHPALEARLGRRRTVQEARALLRCRR

SEQ ID NO: 40763 - protein, 48 aa, Artificial Sequence
  Quasi-synthetic sequence derived from human genome
IKGGHARSKNWRLSVRCGGWPLRWLMENGFLPDPPRIRYRKKKRILKS

SEQ ID NO: 40764 - protein, 48 aa, Artificial Sequence
  Quasi-synthetic sequence derived from human genome
FPKKVYKPIILQQKPRKASEKQSIWIRTKPSDIIRKYISKYSVFLRHR

SEQ ID NO: 40765 - protein, 48 aa, Artificial Sequence
  Quasi-synthetic sequence derived from human genome
RVVAAAGRALRGLSYRSLRRRVRRLRRLTAREAATAVAALLWAAVTRA

SEQ ID NO: 40766 - protein, 48 aa, Artificial Sequence
  Quasi-synthetic sequence derived from human genome
LPMVKRTITRQQWKKKALRSMPKSRNQVLFRRNLTPSQLRTLAPPYML

SEQ ID NO: 40767 - protein, 48 aa, Artificial Sequence
  Quasi-synthetic sequence derived from human genome
LKSSLIRKPRIVSRGRRPRSQQYSVLFKQLGVNTVRKCYKCNICGKIF

SEQ ID NO: 40768 - protein, 48 aa, Artificial Sequence
  Quasi-synthetic sequence derived from human genome
LRLLALIFAIVTTWMFIRSYMSFSMKTIRLPRWLAASPTKEIQVKKYK

SEQ ID NO: 40769 - protein, 48 aa, Artificial Sequence
  Quasi-synthetic sequence derived from human genome
RRGHVRIVSFLLRRNANVNLKNQKERTCLHYAVKKKFTFIDYLLIILL

SEQ ID NO: 40770 - protein, 48 aa, Artificial Sequence
  Quasi-synthetic sequence derived from human genome
FRLLWIDTKIAARMLWRILNGHSLTRRERRQFLRICADLFRLVPFLVF

SEQ ID NO: 40771 - protein, 48 aa, Artificial Sequence
  Quasi-synthetic sequence derived from human genome
LLLLLLLPLPSGAWYKHVASPRYHTVGRAAGLLMGLRRSPYLWRRALR

SEQ ID NO: 40772 - protein, 48 aa, Artificial Sequence
  Quasi-synthetic sequence derived from human genome
ILRSLTDAVPLSVLILGLLIMFITIVFCAAGIVVLVLHRRRRYKKKQV

SEQ ID NO: 40773 - protein, 48 aa, Artificial Sequence
  Quasi-synthetic sequence derived from human genome
LPRKKLKHIRQGTNKGLIKKKLKNMLAAVVTKKKTHKYNCKSSGWISK

SEQ ID NO: 40774 - protein, 48 aa, Artificial Sequence
  Quasi-synthetic sequence derived from human genome
LTRFVKWPRYIRLQRQRAILYKRLKVPPAINQFTQALDRQTATQLLKL

SEQ ID NO: 40775 - protein, 48 aa, Artificial Sequence
  Quasi-synthetic sequence derived from human genome
LAALILCLLVVRFDPASPSSLHFLYKLAQLFRWIRKAAFSRLYQLRIR

SEQ ID NO: 40776 - protein, 48 aa, Artificial Sequence
  Quasi-synthetic sequence derived from human genome
LYRRLGKPLPPNVGFFHTAPPTGRRRKTSKSKLKAGKLLNPLVRQLKV

SEQ ID NO: 40777 - protein, 48 aa, Artificial Sequence
  Quasi-synthetic sequence derived from human genome
KAWVCCVCQQARLLRAQSLEWFYNNVKSRFKRFGSAKVLKNLYRKHRL

SEQ ID NO: 40778 - protein, 48 aa, Artificial Sequence
  Quasi-synthetic sequence derived from human genome
NFKMNILGLLIPFTIFMFCYIKILHQLKRCQNHNKTKAIRLVLIVVIA

SEQ ID NO: 40779 - protein, 48 aa, Artificial Sequence
  Quasi-synthetic sequence derived from human genome
RRRRRPLQRGKPPYSYIALIAMALAHAPGRRLTLAAIYRFITERFAFY

SEQ ID NO: 40780 - protein, 48 aa, Artificial Sequence
  Quasi-synthetic sequence derived from human genome
LRVLRLLRTLRPLRVISRAPGLKLVVETLISSLKPIGNIVLICCAFFI

SEQ ID NO: 40781 - protein, 48 aa, Artificial Sequence
  Quasi-synthetic sequence derived from human genome
RIKIFFALAPVFSTKYLKSPLIRMTYKWKSIVMAFSGNKDFLPKTSFK

SEQ ID NO: 40782 - protein, 48 aa, Artificial Sequence
  Quasi-synthetic sequence derived from human genome
LMIISLAWLVFYYIQRFRYANARDRNQRRLGDAAKKAISKLQIRTIKK

SEQ ID NO: 40783 - protein, 48 aa, Artificial Sequence
  Quasi-synthetic sequence derived from human genome
LLFLPLLVNLCCPYFFQDIGYFLKVAAVGRRVRSYGKRRPARTILRAF

SEQ ID NO: 40784 - protein, 48 aa, Artificial Sequence
  Quasi-synthetic sequence derived from human genome
AVMIPQNVHRILINLMKYLQKWKRYRPLWKLDKAIVMEKFAAKKPPCV

SEQ ID NO: 40785 - protein, 48 aa, Artificial Sequence
  Quasi-synthetic sequence derived from human genome
IIHRLRRRGRSGLQPRVGKSTAILLGITTLFTLLWAPRVFVMLYHMYV

SEQ ID NO: 40786 - protein, 48 aa, Artificial Sequence
  Quasi-synthetic sequence derived from human genome
RAVYRVLKNCPSVALKKKAKCLLSKWKAVYKQTHSKARNSPKLFPVRG

SEQ ID NO: 40787 - protein, 48 aa, Artificial Sequence
  Quasi-synthetic sequence derived from human genome
GTKINLAVANTGILVFQGFTKINAFNWAKVRKLSFKRKRFLIKLRPDA

SEQ ID NO: 40788 - protein, 48 aa, Artificial Sequence
  Quasi-synthetic sequence derived from human genome
LLSLAMLLRLYLVPRAVLLRSGVLLNASYRSIGALNQVRFRHWFVAKL

SEQ ID NO: 40789 - protein, 48 aa, Artificial Sequence
  Quasi-synthetic sequence derived from human genome
MRLTRKRLCSFLIALYCLFSLYAAYHVFFGRRRQAPAGSPRGLRKGAA

SEQ ID NO: 40790 - protein, 48 aa, Artificial Sequence
  Quasi-synthetic sequence derived from human genome
RKINKMTDKLKTHVKARTAQLAKIKWVISVAFYVLQAALMISLIWKYY

SEQ ID NO: 40791 - protein, 48 aa, Artificial Sequence
  Quasi-synthetic sequence derived from human genome
RYFSITRPLTYRAKRTTKRAGVMIGLAWVISFVLWAPAILFWQYFVGK

SEQ ID NO: 40792 - protein, 48 aa, Artificial Sequence
  Quasi-synthetic sequence derived from human genome
FKSMSGTIQLGRKLITKYNRRELTDKLLIFLALALFLATVLYIVKKRL

SEQ ID NO: 40793 - protein, 48 aa, Artificial Sequence
  Quasi-synthetic sequence derived from human genome
RGSVCAGKLFIAPLIMVLGLALGAIAVVIGLFVFPIYCLCKKQRKRSR

SEQ ID NO: 40794 - protein, 48 aa, Artificial Sequence
  Quasi-synthetic sequence derived from human genome
KSAALIIQKYIRAREAGKHERIKYIEFKKSTVILQALVRGWLVRKRFL

SEQ ID NO: 40795 - protein, 48 aa, Artificial Sequence
  Quasi-synthetic sequence derived from human genome
RQKWIVKPPASARGIGIQVIHKWSQLPKRRPLLVQRYLHKPYLISGSK

SEQ ID NO: 40796 - protein, 48 aa, Artificial Sequence
  Quasi-synthetic sequence derived from human genome
ARIIGAVLKIKTASGRKKAFSTCASHLAVVLIFFGSIIFMYVRLKKSY

SEQ ID NO: 40797 - protein, 48 aa, Artificial Sequence
  Quasi-synthetic sequence derived from human genome
RCYRKYKQLTWIALKFALYKKMTQAAILIQSKFRSYYEQKRFQQSRRA

SEQ ID NO: 40798 - protein, 48 aa, Artificial Sequence
  Quasi-synthetic sequence derived from human genome
RTFRLMRVLKLVRFLPALQRQLVVLMKTMDNVATFCMLLMLFIFIFSI

SEQ ID NO: 40799 - protein, 48 aa, Artificial Sequence
  Quasi-synthetic sequence derived from human genome
WKNWLGVKRQPLWTLVLILWPVIIFIILAITRTKFPPTAKPTCYLAPR

SEQ ID NO: 40800 - protein, 48 aa, Artificial Sequence
  Quasi-synthetic sequence derived from human genome
HNPLRYSSILTSNRVAKMGLILAIRSILLVIPFPFTLRRLKYCQKNLL

SEQ ID NO: 40801 - protein, 48 aa, Artificial Sequence
  Quasi-synthetic sequence derived from human genome
KRPRCCSWCRRRRPLLRLPRRTPAKVPPQPAAPRSRDCFFRGPCMLCF

SEQ ID NO: 40802 - protein, 48 aa, Artificial Sequence
  Quasi-synthetic sequence derived from human genome
KVLFYGRKIMRKVSQSTSSLVDTSVSATSRPRMRKKLKMLNIAKKILR

SEQ ID NO: 40803 - protein, 48 aa, Artificial Sequence
  Quasi-synthetic sequence derived from human genome
LGLRLCRPYRLAAGVKFRVLRHEAGRPLRLLMQINPLPYSRVVHTYRL

SEQ ID NO: 40804 - protein, 48 aa, Artificial Sequence
  Quasi-synthetic sequence derived from human genome
RRKKRLRHRVPPRKPEPLVKLHRTALHWACLKGHSQLVNKLLVAGATV

SEQ ID NO: 40805 - protein, 48 aa, Artificial Sequence
  Quasi-synthetic sequence derived from human genome
LFLTCISVHRCLGVLRPLRSLRWGRARYARRVAGAVWVLVLACQAPVL

SEQ ID NO: 40806 - protein, 48 aa, Artificial Sequence
  Quasi-synthetic sequence derived from human genome
GRVALARVSSVKLISKAKIRTVKMTFIIVLAFIVCWTPFFFVQMWSVW

SEQ ID NO: 40807 - protein, 48 aa, Artificial Sequence
  Quasi-synthetic sequence derived from human genome
PLRVLPSVFWSPPSRKKPVLSARNSRMFGHLSPVRIPHLRGKFNLRLP

SEQ ID NO: 40808 - protein, 48 aa, Artificial Sequence
  Quasi-synthetic sequence derived from human genome
RVIQTAFRKYKGRRLKEQQEVAAAVIQRCYRKYKQLTWIALKFALYKK

SEQ ID NO: 40809 - protein, 48 aa, Artificial Sequence
  Quasi-synthetic sequence derived from human genome
RKRLQRVMTKALDHGPDMKAVINMYGRLIHRVRYRRGLWRTRQILNLA

SEQ ID NO: 40810 - protein, 48 aa, Artificial Sequence
  Quasi-synthetic sequence derived from human genome
RLPIRMAKGLGNISAKYRWFAVFYLIIFFFLIPLTVFGLSLAGWRVLV

SEQ ID NO: 40811 - protein, 48 aa, Artificial Sequence
  Quasi-synthetic sequence derived from human genome
KPVFMFCKAIRFSYPSIHPFILIWGNKKLKQTFLSVFWQMRYWVKGEK

SEQ ID NO: 40812 - protein, 48 aa, Artificial Sequence
  Quasi-synthetic sequence derived from human genome
MPSVRSLLRLLAAAAACGAFAFLGYCIYLNRKRRGDPAFKRRLRDKRR

SEQ ID NO: 40813 - protein, 48 aa, Artificial Sequence
  Quasi-synthetic sequence derived from human genome
RIKLFWMPAKHQPDFIYLRHVPLRKVHLFTIIQMSCLGLLWIIKVSRA

SEQ ID NO: 40814 - protein, 48 aa, Artificial Sequence
  Quasi-synthetic sequence derived from human genome
RHQLKTKVVHLSKLPKDTALLLDPNIYRTMPQKRLKRTLIRKVFNLYL

SEQ ID NO: 40815 - protein, 48 aa, Artificial Sequence
  Quasi-synthetic sequence derived from human genome
ARMWRIRRRYCQVLNAVRIIQAYWRCRSCASRGFIKGQYRVTANQLHL

SEQ ID NO: 40816 - protein, 48 aa, Artificial Sequence
  Quasi-synthetic sequence derived from human genome
RHREQERQWRAVMLIQAAIRSWLTRKHIQRLHAAATVIKRAWQKWRIR

SEQ ID NO: 40817 - protein, 48 aa, Artificial Sequence
  Quasi-synthetic sequence derived from human genome
LKAKRKVVKMMIIVVMTFAICWLPYHIYFILTAIYQQLNRWKYIQQVY

SEQ ID NO: 40818 - protein, 48 aa, Artificial Sequence
  Quasi-synthetic sequence derived from human genome
LIKQVLNWMLRKLSCRCCARCCPAPGAPLARRNAITPGSRLRRRLAAL

SEQ ID NO: 40819 - protein, 48 aa, Artificial Sequence
  Quasi-synthetic sequence derived from human genome
LARIAIRGTIKKIIHQETVSKNGNGLKNTPRFKRRRVRRRRMETIVFL

SEQ ID NO: 40820 - protein, 48 aa, Artificial Sequence
  Quasi-synthetic sequence derived from human genome
RLFRVMRLVKLLSRGEGIRTLLWTFIKSFQALPYVALLIVMLFFIYAV

SEQ ID NO: 40821 - protein, 48 aa, Artificial Sequence
  Quasi-synthetic sequence derived from human genome
LQMWVVPLYFTIKLYWWRFLSMWGMFSVITSYILFRATRKPLSGRTPR

SEQ ID NO: 40822 - protein, 48 aa, Artificial Sequence
  Quasi-synthetic sequence derived from human genome
KAVNKVKKKAKRILQEMVATVSPAMIRLTGWVLLKLFNSFFWNIQIHK

SEQ ID NO: 40823 - protein, 48 aa, Artificial Sequence
  Quasi-synthetic sequence derived from human genome
KALRAFRVLRPLRLVSGVPSLQVVLNSIFKAMLPLFHIALLVLFMVII

SEQ ID NO: 40824 - protein, 48 aa, Artificial Sequence
  Quasi-synthetic sequence derived from human genome
FGVRALHRLHQFQQLLWVLGLLVGLLLLLLGLGACYTWRRRRVCKQSM

SEQ ID NO: 40825 - protein, 48 aa, Artificial Sequence
  Quasi-synthetic sequence derived from human genome
KKKTFKCIKCSKSFFMLSCLIRHKRIHIRQNIYKCEERGKAFKSFSTL

SEQ ID NO: 40826 - protein, 48 aa, Artificial Sequence
  Quasi-synthetic sequence derived from human genome
PRSLLQSLSRLQKPRAFILKSKGIKQKQIIPKNLLDSKSLKLIISMTL

SEQ ID NO: 40827 - protein, 48 aa, Artificial Sequence
  Quasi-synthetic sequence derived from human genome
LPKYKKNLKALYVVHPTSFIKVLWNILKPLISHKFGKKVIYFNYLSEL

SEQ ID NO: 40828 - protein, 48 aa, Artificial Sequence
  Quasi-synthetic sequence derived from human genome
YKVVGRCLPTPKCHTPPLYRMRIFAPNHVVAKSRFWYFVSQLKKMKKS

SEQ ID NO: 40829 - protein, 48 aa, Artificial Sequence
  Quasi-synthetic sequence derived from human genome
MKHILVGNKVIYKALKRYEGPLWKSSRFFGWRLFWVVLEHGVLSWYRK

SEQ ID NO: 40830 - protein, 48 aa, Artificial Sequence
  Quasi-synthetic sequence derived from human genome
GRAGKRRPSRLVALREQKALKTLGIIMGVFTLCWLPFFLANVVKAFHR

SEQ ID NO: 40831 - protein, 48 aa, Artificial Sequence
  Quasi-synthetic sequence derived from human genome
RRSRTPSRRSRTPSRRRRSRSVVRRRSFSISPVRLRRSRTPLRRRFSR

SEQ ID NO: 40832 - protein, 48 aa, Artificial Sequence
  Quasi-synthetic sequence derived from human genome
PRRRRYTLTPARLRWDHFNLTYRILSFPRNLLSPRETRRALAAAFRMW

SEQ ID NO: 40833 - protein, 48 aa, Artificial Sequence
  Quasi-synthetic sequence derived from human genome
FSKHPQRKLFQEIFTALVKNRLISREWVNRAPSIHFLRVLICLRLLMR

SEQ ID NO: 40834 - protein, 48 aa, Artificial Sequence
  Quasi-synthetic sequence derived from human genome
KIRRKNCPACRLRKCCQAGMVLGGRKFKKFNKVRVVRALDAVALPQPV

SEQ ID NO: 40835 - protein, 48 aa, Artificial Sequence
  Quasi-synthetic sequence derived from human genome
GLHHQRPKRYFTIVIISSSLLLGLIVLLLISYVMWKAGFFKRQYKSIL

SEQ ID NO: 40836 - protein, 48 aa, Artificial Sequence
  Quasi-synthetic sequence derived from human genome
RRKESKRTNKWQKMLADWTKYRSTKKLSQRVCKVIPLAVRGRALSLLL

SEQ ID NO: 40837 - protein, 48 aa, Artificial Sequence
  Quasi-synthetic sequence derived from human genome
RHLMNKRAKFELRKPLVLWSLTLAVFSIFGALRTGAYMVYILMTKGLK

SEQ ID NO: 40838 - protein, 48 aa, Artificial Sequence
  Quasi-synthetic sequence derived from human genome
RSHIPLLSELWFQLCRYMNPRARKNCSQIALFRKYRFHFFCSMRCRAW

SEQ ID NO: 40839 - protein, 48 aa, Artificial Sequence
  Quasi-synthetic sequence derived from human genome
WYREHCPAGQPVKVRVSYQKLLKYYVLNALKHRPPKAQKKRYLFRSFK

SEQ ID NO: 40840 - protein, 48 aa, Artificial Sequence
  Quasi-synthetic sequence derived from human genome
RGRLMRLEYQRLLGGRDALFTIQWNIRAFNAVKNWSWMKLFFKMKPLL

SEQ ID NO: 40841 - protein, 48 aa, Artificial Sequence
  Quasi-synthetic sequence derived from human genome
AARIVRALFEIALRKRWPTMTYRLLNLSKVIDKRLWGWASPLRQFSIL

SEQ ID NO: 40842 - protein, 48 aa, Artificial Sequence
  Quasi-synthetic sequence derived from human genome
RQKENGPFLRKCFAISLLVICIIISIGIFYGFVANHQVRTRIKRSRKL

SEQ ID NO: 40843 - protein, 48 aa, Artificial Sequence
  Quasi-synthetic sequence derived from human genome
KRLILFRPFGPIMKVKNEKLNMANTLINVIVPLAKRVDKFRQFMQNFR

SEQ ID NO: 40844 - protein, 48 aa, Artificial Sequence
  Quasi-synthetic sequence derived from human genome
IRRKMIGSRTPLKDILKLFPFLKCPYQMFREFQLLTRTDIYKKTRHIL

SEQ ID NO: 40845 - protein, 48 aa, Artificial Sequence
  Quasi-synthetic sequence derived from human genome
RKPLVQTTPRLVYKWFLLIYKISYATGIVGYMAVMFTLFGLNLLFKIK

SEQ ID NO: 40846 - protein, 48 aa, Artificial Sequence
  Quasi-synthetic sequence derived from human genome
RLGIHLIRRKIVKPKHHVLMSRKESWKVKSEIPKVPKQPLVLHHPRMT

SEQ ID NO: 40847 - protein, 48 aa, Artificial Sequence
  Quasi-synthetic sequence derived from human genome
KRMKMVSQSFTQRFRLSRDRKVAKSLAVIVSIFGLCWAPYTLLMIIRA

SEQ ID NO: 40848 - protein, 48 aa, Artificial Sequence
  Quasi-synthetic sequence derived from human genome
KVLSVLKHSLLSFKRRRAMETLKLYFLFSLQLLIKEDYLNKKGNPKKF

SEQ ID NO: 40849 - protein, 48 aa, Artificial Sequence
  Quasi-synthetic sequence derived from human genome
KAMNAAGCLKPKFPFLSIRRSALLYIALHLKAFNPKGSEYTRKKYKKK

SEQ ID NO: 40850 - protein, 48 aa, Artificial Sequence
  Quasi-synthetic sequence derived from human genome
LVRLLQQGHRCLLAPVAPKLVPPVRGVKKGFRAAFRFQKELERQRLLR

SEQ ID NO: 40851 - protein, 48 aa, Artificial Sequence
  Quasi-synthetic sequence derived from human genome
FRKPYVRRRPSKRRGARAFRCIKPAPVIHPASVIFTVPATTVKIVSLG

SEQ ID NO: 40852 - protein, 48 aa, Artificial Sequence
  Quasi-synthetic sequence derived from human genome
LAFVVRIERIDGVSLLVQRTIARLRLKKIFSGVFVKVTPQNLKMLRIV

SEQ ID NO: 40853 - protein, 48 aa, Artificial Sequence
  Quasi-synthetic sequence derived from human genome
MAVLRQLALLLWKNYTLQKRKVLVTVLELFLPLLFSGILIWLRLKIQS

SEQ ID NO: 40854 - protein, 48 aa, Artificial Sequence
  Quasi-synthetic sequence derived from human genome
MKPPISRAKMILITKAAIKAIKLYKHVVQIVEKFIKKCKPEYKVPGLY

SEQ ID NO: 40855 - protein, 48 aa, Artificial Sequence
  Quasi-synthetic sequence derived from human genome
MALLFSFFFIIFIVFISRKCCPPTLRRIRQCSMVQNHRQLRSQTRLHM

SEQ ID NO: 40856 - protein, 48 aa, Artificial Sequence
  Quasi-synthetic sequence derived from human genome
KWIVGPMFLYLCERLVRFWRSQQKVVITKVVTHPFKTIELQMKKKGFK

SEQ ID NO: 40857 - protein, 48 aa, Artificial Sequence
  Quasi-synthetic sequence derived from human genome
KNHVLVLHYVSLFVGFIIPFVIIIVCYTMIILTLLKKSMKKNLSSHKK

SEQ ID NO: 40858 - protein, 48 aa, Artificial Sequence
  Quasi-synthetic sequence derived from human genome
MKFHKKVGKLGVLDKKTIKTINKMKTLKRKNILNQILSCSSSVALKAK

SEQ ID NO: 40859 - protein, 48 aa, Artificial Sequence
  Quasi-synthetic sequence derived from human genome
LRHVPLRKVHLFTLIQLTCLVLLWVIKASPAAIVFPMMVLALVFVRKV

SEQ ID NO: 40860 - protein, 48 aa, Artificial Sequence
  Quasi-synthetic sequence derived from human genome
FLGKKFLREKNKMTKKQTRNRQNKFPPKPALRSSPVHRVQHFPLLWKV

SEQ ID NO: 40861 - protein, 48 aa, Artificial Sequence
  Quasi-synthetic sequence derived from human genome
RWKYIQQVYLASFWLAMSSTMYNPIIYCCLNKRFRAGFKRAFRWCPFI

SEQ ID NO: 40862 - protein, 48 aa, Artificial Sequence
  Quasi-synthetic sequence derived from human genome
RQKGLRSICMHTKKRVSSFRGNKIGLKDVITLRRHVETKVRAKIRKRK

SEQ ID NO: 40863 - protein, 48 aa, Artificial Sequence
  Quasi-synthetic sequence derived from human genome
LVLIPKAKPLTLLWAYFCFLLAALGVTAGAHRLWSHRSYRAKLPLRIF

SEQ ID NO: 40864 - protein, 48 aa, Artificial Sequence
  Quasi-synthetic sequence derived from human genome
KLVKPKKKRRKKSVYTVGLRGLINLGNTCFMNCIVQALTHIPLLKDFF

SEQ ID NO: 40865 - protein, 48 aa, Artificial Sequence
  Quasi-synthetic sequence derived from human genome
IKRTPSATFQQATKIKKLRAGKLSPLKSKFKTGKLQIGRKGVQIVRRR

SEQ ID NO: 40866 - protein, 48 aa, Artificial Sequence
  Quasi-synthetic sequence derived from human genome
MPQIIKMTRILTAFKVVRTLKTGFGFTNVTAHQKWKFSRPGIRLLSVK

SEQ ID NO: 40867 - protein, 48 aa, Artificial Sequence
  Quasi-synthetic sequence derived from human genome
ARKYDKEKVLLQLRYTGILETARIRRLGFSHRILFANFIKRYYLLCYK

SEQ ID NO: 40868 - protein, 48 aa, Artificial Sequence
  Quasi-synthetic sequence derived from human genome
KKTAIVVIQNYYRLYVRVKTERKNFLAVQKSVRTIQAAFRGMKVRQKL

SEQ ID NO: 40869 - protein, 48 aa, Artificial Sequence
  Quasi-synthetic sequence derived from human genome
KRYLWATVTIQRHWRAYLRRKQDQQRYEMLKSSTLIIQSMFRKWKQRK

SEQ ID NO: 40870 - protein, 48 aa, Artificial Sequence
  Quasi-synthetic sequence derived from human genome
KGPWRPTPRPRVPVPWRTPRFACRWLGYLGLLLLDVIICLLVLVGLIR

SEQ ID NO: 40871 - protein, 48 aa, Artificial Sequence
  Quasi-synthetic sequence derived from human genome
FTRGQRIFVQGQRKLAKASRKLIKKRESLSKEPAKLNKILKALQKLTR

SEQ ID NO: 40872 - protein, 48 aa, Artificial Sequence
  Quasi-synthetic sequence derived from human genome
LKPKVRKERDRVAQPKKSFNKIVRILPTTLPTTRIHLKKSVPRTLLHW

SEQ ID NO: 40873 - protein, 48 aa, Artificial Sequence
  Quasi-synthetic sequence derived from human genome
LVLNRVPLRRTHQKFVIATSTKIDISNVKIPKHLTDAYFKKKKLRKPR

SEQ ID NO: 40874 - protein, 48 aa, Artificial Sequence
  Quasi-synthetic sequence derived from human genome
LCYVLIIAKMRMVALKAGWQQRKRSERKITLMVMMVVMVFVICWMPFY

SEQ ID NO: 40875 - protein, 48 aa, Artificial Sequence
  Quasi-synthetic sequence derived from human genome
GFKNLFYRTYMLFKNASGKRRFLLCLLLFTVITYFFVVIGIAPIFILY

SEQ ID NO: 40876 - protein, 48 aa, Artificial Sequence
  Quasi-synthetic sequence derived from human genome
KTNRIARILAGSKKKICTRKPRFMSAWAQVIIASILISVQLTLVVTLI

SEQ ID NO: 40877 - protein, 48 aa, Artificial Sequence
  Quasi-synthetic sequence derived from human genome
KVAARMVWRLLHGQVLTRRERRRLLRTCVDFFRLVPFMVFLIVPFMEF

SEQ ID NO: 40878 - protein, 48 aa, Artificial Sequence
  Quasi-synthetic sequence derived from human genome
RAVRNLKKKLLPWQRRGLLRAQGLRGWKARRATTGTQTLLSSGTRLKH

SEQ ID NO: 40879 - protein, 48 aa, Artificial Sequence
  Quasi-synthetic sequence derived from human genome
YYKKKNTFIVLNKNRTIFRFNAASILCTLSPFNCIRRTTIKVLVHPFF

SEQ ID NO: 40880 - protein, 48 aa, Artificial Sequence
  Quasi-synthetic sequence derived from human genome
LVDLHRSFHTCISRQRVLPRMQARMRGFQARKRYLRRRAALGQLNTIL

SEQ ID NO: 40881 - protein, 48 aa, Artificial Sequence
  Quasi-synthetic sequence derived from human genome
KALRAFRVLRPLRLVSGVPSLQVVLNSIIKAMVPLLHIALLVLFVIII

SEQ ID NO: 40882 - protein, 48 aa, Artificial Sequence
  Quasi-synthetic sequence derived from human genome
LVRKSFKVHVPISIIPGDFPLSSEVRKKLEQHIRKRLIQRRWGLPRRI

SEQ ID NO: 40883 - protein, 48 aa, Artificial Sequence
  Quasi-synthetic sequence derived from human genome
LNFPRSPRIRKRFLLRRILEMLFFTQLQVGLIQQWMVPTIQNSMKPFK

SEQ ID NO: 40884 - protein, 48 aa, Artificial Sequence
  Quasi-synthetic sequence derived from human genome
YSFAQFRYLQRLLLVHGRWSYFRMCKFLCYFFYKNFAFTLVHFWFGFF

SEQ ID NO: 40885 - protein, 48 aa, Artificial Sequence
  Quasi-synthetic sequence derived from human genome
KRQMMSIYCYWYSLYTRTWLGYLFYRQQLRRARNRYPKGHSKTQPRLF

SEQ ID NO: 40886 - protein, 48 aa, Artificial Sequence
  Quasi-synthetic sequence derived from human genome
LVKDQKKMIIWFPDMVKDVIGSYKKWCRSILRRTSLILARVFGLHLRL

SEQ ID NO: 40887 - protein, 48 aa, Artificial Sequence
  Quasi-synthetic sequence derived from human genome
KGTMRRMALSMIERRKRWRTIKLLLRRGADPNLCCVPMQVLFLAVKAG

SEQ ID NO: 40888 - protein, 48 aa, Artificial Sequence
  Quasi-synthetic sequence derived from human genome
IRASAVGLLGTLVRRGRGGLRLGLRGPLRKLVLQSLVPLLLRLHDPSR

SEQ ID NO: 40889 - protein, 48 aa, Artificial Sequence
  Quasi-synthetic sequence derived from human genome
IFMFCYIKILHQLKRCQNHNKTKAIRLVLIVVIASLLFWVPFNVVLFL

SEQ ID NO: 40890 - protein, 48 aa, Artificial Sequence
  Quasi-synthetic sequence derived from human genome
PLVAHTRGVPPLLKSFLQERLGIHLIRRKIVKPKHHVLMSRKESWKVK

SEQ ID NO: 40891 - protein, 48 aa, Artificial Sequence
  Quasi-synthetic sequence derived from human genome
RTPMSWSRIKKILKEGPMLKNCNSFKRWKLRYFLVQGQKLYFAHHPAF

SEQ ID NO: 40892 - protein, 48 aa, Artificial Sequence
  Quasi-synthetic sequence derived from human genome
IRMRRIVFAGVILFRLLGVILFRLLGVILFGRLGDLGTCQTKPGQYWK

SEQ ID NO: 40893 - protein, 48 aa, Artificial Sequence
  Quasi-synthetic sequence derived from human genome
KKHLKRVAAPKHWMLDKLTGVFAPRPSTGPHKLRECLPLIIFLRNRLK

SEQ ID NO: 40894 - protein, 48 aa, Artificial Sequence
  Quasi-synthetic sequence derived from human genome
AHPFLLLILLCMSLLLFQVIRLYQRRRWMIRALHLFPAPPAHWFYGHK

SEQ ID NO: 40895 - protein, 48 aa, Artificial Sequence
  Quasi-synthetic sequence derived from human genome
LRSICMHTKKRVSSFRGNKIGLKDVITLRRHVETKVRAKIRKRKVTTK

SEQ ID NO: 40896 - protein, 48 aa, Artificial Sequence
  Quasi-synthetic sequence derived from human genome
IILGKVILWILHLLLECYIQYHHSKIRNRGYNLIYRSTRHLKRLALMI

SEQ ID NO: 40897 - protein, 48 aa, Artificial Sequence
  Quasi-synthetic sequence derived from human genome
RLVRMKVFHLSLSQSVVLRHHWILPFVQALKARMTSFHRFFFTANQVK

SEQ ID NO: 40898 - protein, 48 aa, Artificial Sequence
  Quasi-synthetic sequence derived from human genome
KQRSVCTWGKNKPGIGAVILKRAKALAGQSVRICKGPRAVFSRILLLF

SEQ ID NO: 40899 - protein, 48 aa, Artificial Sequence
  Quasi-synthetic sequence derived from human genome
KCRLRLLLPGKPDKSGRPISFMVVFITPNPLSKISWVNRLHLAKIGLR

SEQ ID NO: 40900 - protein, 48 aa, Artificial Sequence
  Quasi-synthetic sequence derived from human genome
FLKMSVSVNFFRPFTRFLVPFTLHRKRNNLTILQRYMSSKIPAVTYPK

SEQ ID NO: 40901 - protein, 48 aa, Artificial Sequence
  Quasi-synthetic sequence derived from human genome
WVGRGLVTLDGSKWKKHRQIVKPGFNISILKIFITMMSKSVRMMLNKW

SEQ ID NO: 40902 - protein, 48 aa, Artificial Sequence
  Quasi-synthetic sequence derived from human genome
VLFSTWRRKKKSRMTFFVTQLAITGCAALRLYLRPGVPQHRQIPCHRL

SEQ ID NO: 40903 - protein, 48 aa, Artificial Sequence
  Quasi-synthetic sequence derived from human genome
LVLQPRAQVGTMSPAIALAFLPLVVTLLVRYRHYFRLLVRTVLLRSLR

SEQ ID NO: 40904 - protein, 48 aa, Artificial Sequence
  Quasi-synthetic sequence derived from human genome
LRLAHGVRLKANKDSLYKPILRQKKHFNSLHIPKALQKALPFKNKPKT

SEQ ID NO: 40905 - protein, 48 aa, Artificial Sequence
  Quasi-synthetic sequence derived from human genome
KQHRIRQLPVGKKEVEHYRKRWREINARPIKKVAEAKARKKRRMLKRL

SEQ ID NO: 40906 - protein, 48 aa, Artificial Sequence
  Quasi-synthetic sequence derived from human genome
VFAQMLSSVSTWLAIILLIFISLFPEILLIVLKNVRRRSARRNLSCRR

SEQ ID NO: 40907 - protein, 48 aa, Artificial Sequence
  Quasi-synthetic sequence derived from human genome
GLFRIKIQGATGKFNMVIPLVDGMIVSRRALGFLVRQTVINICRRKRL

SEQ ID NO: 40908 - protein, 48 aa, Artificial Sequence
  Quasi-synthetic sequence derived from human genome
KKLKKPAKPLLSKIKLRNHCKRLEQKNASRKLEMGNLVLKEPKVVLYK

SEQ ID NO: 40909 - protein, 48 aa, Artificial Sequence
  Quasi-synthetic sequence derived from human genome
MRRIRYEFKAKNIKKKKVSIMVSVDGVKVILKKKKKKKEWTWDESKML

SEQ ID NO: 40910 - protein, 48 aa, Artificial Sequence
  Quasi-synthetic sequence derived from human genome
LRALLLWGRRLRPLLRAPALAAVPGGKPILCPRRTTAQLGPRRNPAWS

SEQ ID NO: 40911 - protein, 48 aa, Artificial Sequence
  Quasi-synthetic sequence derived from human genome
CQPRSFLRDLVETTHLFLKMLERFCRSRGNLVVQNKQKKRRKKKKKVL

SEQ ID NO: 40912 - protein, 48 aa, Artificial Sequence
  Quasi-synthetic sequence derived from human genome
FLRSHLKKKSIVFFSSCKEVQYLYRVFCRLRPGVSILALHGRQQQMRR

SEQ ID NO: 40913 - protein, 48 aa, Artificial Sequence
  Quasi-synthetic sequence derived from human genome
SRANRIRSNSSAANLMAKKRVIRMLIVIVVLFFLCWMPIFSANAWRAY

SEQ ID NO: 40914 - protein, 48 aa, Artificial Sequence
  Quasi-synthetic sequence derived from human genome
FGAMFAKTWRVHAIFKNVKMKKKIIKDQKLLVIVGGMLLIDLCILICW

SEQ ID NO: 40915 - protein, 48 aa, Artificial Sequence
  Quasi-synthetic sequence derived from human genome
KPFRVRKLLDLQAKMGMQPHLQALLSLYKFFAPALISVSLPVRKKIYF

SEQ ID NO: 40916 - protein, 48 aa, Artificial Sequence
  Quasi-synthetic sequence derived from human genome
MRSGGRGRPRLRLGERGLMEPLLPPKRRLLPRVRLLPLLLALAVGSAF

SEQ ID NO: 40917 - protein, 48 aa, Artificial Sequence
  Quasi-synthetic sequence derived from human genome
TVATMRKPRCSLPDVLGVAGLVRRRRRYALSGSVWKKRTLTWRVRSFP

SEQ ID NO: 40918 - protein, 48 aa, Artificial Sequence
  Quasi-synthetic sequence derived from human genome
KRWALVWLACLLFAAALSLILLLKKDHAKGWLRLLKQDVRSGAAARGR

SEQ ID NO: 40919 - protein, 48 aa, Artificial Sequence
  Quasi-synthetic sequence derived from human genome
IISSILGSVWLAYKTPKLLRTARGRRIKKCATQLCRRCKTVCQFRASA

SEQ ID NO: 40920 - protein, 48 aa, Artificial Sequence
  Quasi-synthetic sequence derived from human genome
LPSVTELFPEFRPGKVLRFLRLFGPGKNVPSVWRSARRKRKKKHRELI

SEQ ID NO: 40921 - protein, 48 aa, Artificial Sequence
  Quasi-synthetic sequence derived from human genome
KLFTRREHVKRHSLVHKKDKKYKCMVCKKIFMLAASVGIRHGSRRYGV

SEQ ID NO: 40922 - protein, 48 aa, Artificial Sequence
  Quasi-synthetic sequence derived from human genome
PVLFWVILVLVVVVGSSAFLLCHRRACRKRIRQKLHLCYPVQTSQPKL

SEQ ID NO: 40923 - protein, 48 aa, Artificial Sequence
  Quasi-synthetic sequence derived from human genome
RRHIRQHSALTRLRLRNVFRRFLRDFQPGRLSQQMVMVKYLATLERLA

SEQ ID NO: 40924 - protein, 48 aa, Artificial Sequence
  Quasi-synthetic sequence derived from human genome
RPKKGLATAKQRLGRILKIHRNGKLLLRQVIVQAECRQAIHEPKLKRR

SEQ ID NO: 40925 - protein, 48 aa, Artificial Sequence
  Quasi-synthetic sequence derived from human genome
KGLATRLSRRRVSCRELGRPDCDGWLLLRKAPGGFMGPRWRRRWFVLK

SEQ ID NO: 40926 - protein, 48 aa, Artificial Sequence
  Quasi-synthetic sequence derived from human genome
VKRKREENLKMVWRINPAHRKLQARLDQMRKFRRQHEQLRAVIVRVLR

SEQ ID NO: 40927 - protein, 48 aa, Artificial Sequence
  Quasi-synthetic sequence derived from human genome
IIIQRWYRGIKITNHQHKEYLNLKKTAIKIQSVYRGIRVRRHIQHMHR

SEQ ID NO: 40928 - protein, 48 aa, Artificial Sequence
  Quasi-synthetic sequence derived from human genome
MHYMYRPRSRSPRICHRFISRYRSRSRSRSPYRIRNPFRGSPKCFRSV

SEQ ID NO: 40929 - protein, 48 aa, Artificial Sequence
  Quasi-synthetic sequence derived from human genome
VQNAVIKIQSSYRRWMIRKRMREMHRAATFIQSTFRMHRLHMRYQALK

SEQ ID NO: 40930 - protein, 48 aa, Artificial Sequence
  Quasi-synthetic sequence derived from human genome
AFCRMVTRKLETQKCAALRIQFFLQMAVYRRRFVQQKRAAITLQHYFR

SEQ ID NO: 40931 - protein, 48 aa, Artificial Sequence
  Quasi-synthetic sequence derived from human genome
PALTRKGARALAAKALARRRAYRRLNRTVAELVQFLLVKDKKKSPITR

SEQ ID NO: 40932 - protein, 48 aa, Artificial Sequence
  Quasi-synthetic sequence derived from human genome
LIFTFFVPLLSIVTCYCCIARKLCAHYQQSGKHNKKLKKSIKIIFIVV

SEQ ID NO: 40933 - protein, 48 aa, Artificial Sequence
  Quasi-synthetic sequence derived from human genome
GVRPWKRAAILNYTKGLYFQAFGGRRRCLSKSVAPLLAHGYRRFLPTK

SEQ ID NO: 40934 - protein, 48 aa, Artificial Sequence
  Quasi-synthetic sequence derived from human genome
LLIISCRKLFYFKIWAFLDVSFVERILKSQKERQCALRVFKARIYTNR

SEQ ID NO: 40935 - protein, 48 aa, Artificial Sequence
  Quasi-synthetic sequence derived from human genome
RWAKKIEARERKAKMTDFDRFKVMKAKKMRNRIIKNEVKKLQKAALLK

SEQ ID NO: 40936 - protein, 48 aa, Artificial Sequence
  Quasi-synthetic sequence derived from human genome
LRILSKYHRFISFTLYLIGFCMFVLSLVKKHYRLQFYMFGWTHVTLLI

SEQ ID NO: 40937 - protein, 48 aa, Artificial Sequence
  Quasi-synthetic sequence derived from human genome
RINIVKMAILPKVIYRFNAIPIKLPMTFFTELEKTTLKFIWNQKRARI

SEQ ID NO: 40938 - protein, 48 aa, Artificial Sequence
  Quasi-synthetic sequence derived from human genome
RFIKYFVKGRQAVLSMVRKAKYRELLLSELLGRRAPVVVRLGLTYHVH

SEQ ID NO: 40939 - protein, 48 aa, Artificial Sequence
  Quasi-synthetic sequence derived from human genome
VHKMPYFTRLILFLFCLMVLVESRKPKRKRWTGQVEMPKPSHLYKKNL

SEQ ID NO: 40940 - protein, 48 aa, Artificial Sequence
  Quasi-synthetic sequence derived from human genome
RRPGAPASWIWWRMLRQVLRRGLQSFCHRLGLCVSRHPVFFLTVPAVL

SEQ ID NO: 40941 - protein, 48 aa, Artificial Sequence
  Quasi-synthetic sequence derived from human genome
PARRRIPRTPALCTPLALPAPTTRRRQSPWTRFQWRRRAWAAPLWPPR

SEQ ID NO: 40942 - protein, 48 aa, Artificial Sequence
  Quasi-synthetic sequence derived from human genome
FKFLQRLLLVHGRWSYLRMCKFLCYFFYKNFAFTMVHFWFGFFCGFSA

SEQ ID NO: 40943 - protein, 48 aa, Artificial Sequence
  Quasi-synthetic sequence derived from human genome
RKRLLHRQSTQLLAQRLSRTCFRQWRQQLAARRQEQRATVRALWFWAF

SEQ ID NO: 40944 - protein, 48 aa, Artificial Sequence
  Quasi-synthetic sequence derived from human genome
HNKRVIGKAGRNRWLGKRPNSGRWHRKGGWAGRKIRPLPPMKSYVKLP

SEQ ID NO: 40945 - protein, 48 aa, Artificial Sequence
  Quasi-synthetic sequence derived from human genome
RHTAGAKRYKYLRRLFRFRQMDFEFAAWQMLYLFTSPQRVYRNFHYRK

SEQ ID NO: 40946 - protein, 48 aa, Artificial Sequence
  Quasi-synthetic sequence derived from human genome
RKPRPGRVIRDKLRIYAHCTNHHNHNYVRGSITLFIINLHRSRKKIKL

SEQ ID NO: 40947 - protein, 48 aa, Artificial Sequence
  Quasi-synthetic sequence derived from human genome
WLSLKTYKWQGLWNIPTYKGKMKRIAFQFTPYSWVRFEWKPASSLRRW

SEQ ID NO: 40948 - protein, 48 aa, Artificial Sequence
  Quasi-synthetic sequence derived from human genome
LMARRLLKPAYGTSGGLPRAKRKSVRTIAVVLAVFALCFLPFHVTRTL

SEQ ID NO: 40949 - protein, 48 aa, Artificial Sequence
  Quasi-synthetic sequence derived from human genome
ALGSVLRPLRARPGCRPRRPHPAARCLPLRPHRPTRRHRRPGGFPLAW

SEQ ID NO: 40950 - protein, 48 aa, Artificial Sequence
  Quasi-synthetic sequence derived from human genome
GLNVAKMFPKVRESQLLLNVVSQLAKRNLRLLVLGRKHMLRRSSQWSR

SEQ ID NO: 40951 - protein, 48 aa, Artificial Sequence
  Quasi-synthetic sequence derived from human genome
YLRHLKMHKLFLCLQCGKTFTQKKNLNRHIRGHMGIRPFQCTVCLKTF

SEQ ID NO: 40952 - protein, 48 aa, Artificial Sequence
  Quasi-synthetic sequence derived from human genome
WWVRNTRILRKCIEKVAKAAFYRKNDPLDAAIFYLAMKKKAVIWGLYR

SEQ ID NO: 40953 - protein, 48 aa, Artificial Sequence
  Quasi-synthetic sequence derived from human genome
FNYLLRGGSHFPHGISRVRPLKTCSRPIRIGLSRKARIKQLHPYLKQM

SEQ ID NO: 40954 - protein, 48 aa, Artificial Sequence
  Quasi-synthetic sequence derived from human genome
LDRCSRMAPLLSRSYLAVWALSSLLVFLLMVAVYTRIFFYVRRRVQRM

SEQ ID NO: 40955 - protein, 48 aa, Artificial Sequence
  Quasi-synthetic sequence derived from human genome
LYRKAAVVLQNHYRAFLSAKHQRQVYLQIRSSVIIIQARSKGFIQKRK

SEQ ID NO: 40956 - protein, 48 aa, Artificial Sequence
  Quasi-synthetic sequence derived from human genome
MKWLLLLGLVALSECIMYKVPLIRKKSLRRTLSERGLLKDFLKKHNLN

SEQ ID NO: 40957 - protein, 48 aa, Artificial Sequence
  Quasi-synthetic sequence derived from human genome
RRILGQPLSIPTSQPKQKRTSMISFFSKVSWKLRFQKREPLKNVFFIL

SEQ ID NO: 40958 - protein, 48 aa, Artificial Sequence
  Quasi-synthetic sequence derived from human genome
FKAKVKRRPEMSRGLLAVRGAFVGASLLFLLVNVLCAVLSHRRRAQPW

SEQ ID NO: 40959 - protein, 48 aa, Artificial Sequence
  Quasi-synthetic sequence derived from human genome
QVGQQLFQSFSSTLVLIVLVTLIFCLIVLSLSTFHIHKRRMKKRKMQR

SEQ ID NO: 40960 - protein, 48 aa, Artificial Sequence
  Quasi-synthetic sequence derived from human genome
KFKNSLVVSFLSYCDYYRPRFFLLENVRNFVSFKRSMVLKLTLRCLVR

SEQ ID NO: 40961 - protein, 48 aa, Artificial Sequence
  Quasi-synthetic sequence derived from human genome
RRYRMTHSEKKRLKQCNVITRLRGLQVPVGLPFLLILLGLYLMPLGIY

SEQ ID NO: 40962 - protein, 48 aa, Artificial Sequence
  Quasi-synthetic sequence derived from human genome
RKVPGFVPASPWGLRLPQKFLFLLFLSGLVTLCFGALFLLPHSSRLKR

SEQ ID NO: 40963 - protein, 48 aa, Artificial Sequence
  Quasi-synthetic sequence derived from human genome
YSGILKTLLRCRNEKKRHRAVRLIFTIMIVYFLFWAPYNIVLLLNTFQ

SEQ ID NO: 40964 - protein, 48 aa, Artificial Sequence
  Quasi-synthetic sequence derived from human genome
KLKLRPRIRPRRDHRPEKQPSRIPRPLAYVFLGPARQPPKDRLLRAVL

SEQ ID NO: 40965 - protein, 48 aa, Artificial Sequence
  Quasi-synthetic sequence derived from human genome
RYIAICKPLRYTMILTSKIISLIAGIAVLRSLYMVVPLVFLLLRLPFC

SEQ ID NO: 40966 - protein, 48 aa, Artificial Sequence
  Quasi-synthetic sequence derived from human genome
RVLPPVVWSPPSRKKPVLSARNSRMFGYLSPVRIPRLRGKFNLQLPSL

SEQ ID NO: 40967 - protein, 48 aa, Artificial Sequence
  Quasi-synthetic sequence derived from human genome
PLKTFVFFIWRRYWRTLVLLLLVLLTVFLLLVFYTIPGQISQVIFRPL

SEQ ID NO: 40968 - protein, 48 aa, Artificial Sequence
  Quasi-synthetic sequence derived from human genome
KKRVEKKERARLKTVKFHARTGMIESNRSIKTKRKKSFRLSRKFPFYK

SEQ ID NO: 40969 - protein, 48 aa, Artificial Sequence
  Quasi-synthetic sequence derived from human genome
MRLWKARVLKLVLKTAKDSRLGLNSKWLSLKLGDAGNPRSLAIRFILT

SEQ ID NO: 40970 - protein, 48 aa, Artificial Sequence
  Quasi-synthetic sequence derived from human genome
LKNLVRTFRLTNRNIIHKPAEWTLIAMVLLSFLLNVKTRIKTFMMIYF

SEQ ID NO: 40971 - protein, 48 aa, Artificial Sequence
  Quasi-synthetic sequence derived from human genome
HFSNWPATSLSIFYLLKIANFSNLIFLRLKRRVKSVILVVLLGPLLFL

SEQ ID NO: 40972 - protein, 48 aa, Artificial Sequence
  Quasi-synthetic sequence derived from human genome
ALVLKLDLRMKIIQNGIFLRKYNCIGHYLQDLKGKFPGIFIRVKAMRV

SEQ ID NO: 40973 - protein, 48 aa, Artificial Sequence
  Quasi-synthetic sequence derived from human genome
LAFKNDISFWKKKKSMIGMSTKLWKVKKALKMTIFWRGLMPEFQFGTY

SEQ ID NO: 40974 - protein, 48 aa, Artificial Sequence
  Quasi-synthetic sequence derived from human genome
YRRRHMAAICIQARWKAYRESKRYQEQRKKIILLQSTCRGFRARQRFK

SEQ ID NO: 40975 - protein, 48 aa, Artificial Sequence
  Quasi-synthetic sequence derived from human genome
RRLVQLLRQHSSPWQVYGFVRACLRRLVPPGLWGSRHNERRFLRNTKK

SEQ ID NO: 40976 - protein, 48 aa, Artificial Sequence
  Quasi-synthetic sequence derived from human genome
RRWRKLYRANGHLFQAKRFNRRAYCGQCSERIWGLARQGYRCINCKLL

SEQ ID NO: 40977 - protein, 48 aa, Artificial Sequence
  Quasi-synthetic sequence derived from human genome
PAFFGLYFLVVALPYANSCANPILYGFLSYRFKQGFRRVLLRPSRRVR

SEQ ID NO: 40978 - protein, 48 aa, Artificial Sequence
  Quasi-synthetic sequence derived from human genome
HFNRYLTRRRRIEIAHTLCLSERQVKIWFQNRRMKWKKDHKLPNTKMR

SEQ ID NO: 40979 - protein, 48 aa, Artificial Sequence
  Quasi-synthetic sequence derived from human genome
AFLIMVVVYLRIYVYVKRKTNVLSPHTSGSISRRRTPMKLMKTVMTVL

SEQ ID NO: 40980 - protein, 48 aa, Artificial Sequence
  Quasi-synthetic sequence derived from human genome
RLKLLLMPLKHQPDFIYLRHVPLRRVHLFTFLQVLCLALLWILKSTVA

SEQ ID NO: 40981 - protein, 48 aa, Artificial Sequence
  Quasi-synthetic sequence derived from human genome
LSYIKRGKTRNYLYPIWSPYAYYLYCYKYRITLREKMLPRCYKSITYK

SEQ ID NO: 40982 - protein, 48 aa, Artificial Sequence
  Quasi-synthetic sequence derived from human genome
LTSNSCRRTRSGVGWKRVLRSLCHSRTRVPLLAAIYFLMIHVLLILCF

SEQ ID NO: 40983 - protein, 48 aa, Artificial Sequence
  Quasi-synthetic sequence derived from human genome
ILLRRKLTAPVAFSVIAMFNVMKFSIAILPFSIKAMAEANVSLRRMKK

SEQ ID NO: 40984 - protein, 48 aa, Artificial Sequence
  Quasi-synthetic sequence derived from human genome
RRLPARPGTAGTTSTRARRKPRSLALLRTLSVVLLAFVACWGPLFLLL

SEQ ID NO: 40985 - protein, 48 aa, Artificial Sequence
  Quasi-synthetic sequence derived from human genome
LYHALPFFCFLLGKCFKKGLKGKGFVLLVKLACIVVASFVLCWLPFFT

SEQ ID NO: 40986 - protein, 48 aa, Artificial Sequence
  Quasi-synthetic sequence derived from human genome
LLRRWKHWLLLLGICCPKPHGRVSSRLRLSRSLGHFFHSAFATFMGVC

SEQ ID NO: 40987 - protein, 48 aa, Artificial Sequence
  Quasi-synthetic sequence derived from human genome
LLVFTALAILIMRLKMFLTPHMCVMASLICSRQLFGWLFRRVRFEKVI

SEQ ID NO: 40988 - protein, 48 aa, Artificial Sequence
  Quasi-synthetic sequence derived from human genome
LLKAVHIVQFIFILKLGTAFFMVLFQKPFSSGKTITKHQWIKIFKHAV

SEQ ID NO: 40989 - protein, 48 aa, Artificial Sequence
  Quasi-synthetic sequence derived from human genome
NVLRETWLIYKHTKLLKKIDHAKVRKHQRKFLQAIHQLRSVKMEQRKL

SEQ ID NO: 40990 - protein, 48 aa, Artificial Sequence
  Quasi-synthetic sequence derived from human genome
RTLKKKKLFKLTGDILVQILFLTLLMTAIYSAKNSNRFYLHQAIWKTF

SEQ ID NO: 40991 - protein, 48 aa, Artificial Sequence
  Quasi-synthetic sequence derived from human genome
WYIFYFVIQRKKWVDLAWMITFYVRFFLTYVPLLGLKAFLGLFFIVRF

SEQ ID NO: 40992 - protein, 48 aa, Artificial Sequence
  Quasi-synthetic sequence derived from human genome
LAYLFWPKRRCPGAKYPKSLLSLPLVGSLPFLPRHGHMHNNFFKLQKK

SEQ ID NO: 40993 - protein, 48 aa, Artificial Sequence
  Quasi-synthetic sequence derived from human genome
VPCIPPHRLSKITNRLTIQRKSQFMQRLHSYWTLKRQSRNGVPLLRRL

SEQ ID NO: 40994 - protein, 48 aa, Artificial Sequence
  Quasi-synthetic sequence derived from human genome
RGYLARQRYQQMRRSLVKFRSLVHAYVSRRRYLKLRAEWRCQVEGALL

SEQ ID NO: 40995 - protein, 48 aa, Artificial Sequence
  Quasi-synthetic sequence derived from human genome
LKSNWLGLRFLRALRLLELPQILQILRAIKTSNSVKFSKLLSIILSTW

SEQ ID NO: 40996 - protein, 48 aa, Artificial Sequence
  Quasi-synthetic sequence derived from human genome
HYNRYLTRRRRVEIAHALCLSERQIKIWFQNRRMKWKKDHKLPNTKIR

SEQ ID NO: 40997 - protein, 48 aa, Artificial Sequence
  Quasi-synthetic sequence derived from human genome
MSLRAYTARCRLNRLRRAACRLFTSEKMVKAIKKLEIEIEARRLIVRK

SEQ ID NO: 40998 - protein, 48 aa, Artificial Sequence
  Quasi-synthetic sequence derived from human genome
CLAVTRPFLAPRLRSPALARRLLLAVWLAALLLAVPAAVYRHLWRDRV

SEQ ID NO: 40999 - protein, 48 aa, Artificial Sequence
  Quasi-synthetic sequence derived from human genome
APGRMEWIIPLIVVSALTFVCLILLIAVLVYWRGCNKIKSKGFPRRFR

SEQ ID NO: 41000 - protein, 48 aa, Artificial Sequence
  Quasi-synthetic sequence derived from human genome
RQLAVRPSTPHTITLQPSSFRNLRLPKRLRVVYFLARTRLAQRLIMAG

SEQ ID NO: 41001 - protein, 49 aa, Artificial Sequence
  Quasi-synthetic sequence derived from human genome
TAFCLLAKGLLIFLLLVILAMGLWVIRVQKRHKMPRMKKLMRNRMKLRK

SEQ ID NO: 41002 - protein, 49 aa, Artificial Sequence
  Quasi-synthetic sequence derived from human genome
GLLLKRGSCRSTWLRVRKARPQLILSRRPRRRLGSLRWCGRRRLRWRLL

SEQ ID NO: 41003 - protein, 49 aa, Artificial Sequence
  Quasi-synthetic sequence derived from human genome
IFRGKKARRHLKMMHIAATLIQRRFRTLMMRRRFLSLKKTAILIQRKYR

SEQ ID NO: 41004 - protein, 49 aa, Artificial Sequence
  Quasi-synthetic sequence derived from human genome
IKLLRNIPRWTHLLRLLRLIILLRIFHLFHQKRQLEKLIRRRVSENKRR

SEQ ID NO: 41005 - protein, 49 aa, Artificial Sequence
  Quasi-synthetic sequence derived from human genome
RIYAVSTLLLFLLFFLFRLLLRFLRLCRSFYITCRRLRCFPQPPRRNWL

SEQ ID NO: 41006 - protein, 49 aa, Artificial Sequence
  Quasi-synthetic sequence derived from human genome
FTLPYPVKIKVRFSFFLQIYLIMIFLGLYINFRHLYKQRRRRYGQKKKK

SEQ ID NO: 41007 - protein, 49 aa, Artificial Sequence
  Quasi-synthetic sequence derived from human genome
KRALGRRKGVWLRLRKILFCVLGLYIAIPFLIKLCPGIQAKLIFLNFVR

SEQ ID NO: 41008 - protein, 49 aa, Artificial Sequence
  Quasi-synthetic sequence derived from human genome
RCLRGFFIKRRFRSLRHKIILLQSRARGYLARQRYQQMRRSLVKFRSLV

SEQ ID NO: 41009 - protein, 49 aa, Artificial Sequence
  Quasi-synthetic sequence derived from human genome
LLRLLNKLTKWKHSRTMMLVVFKSAPILKRALKVKQAMLQLYVLKLLKL

SEQ ID NO: 41010 - protein, 49 aa, Artificial Sequence
  Quasi-synthetic sequence derived from human genome
HRIAGVKRFLKHAGKWSLRWFLSPRWILQFRRWARKWSRFTRSSFQVRW

SEQ ID NO: 41011 - protein, 49 aa, Artificial Sequence
  Quasi-synthetic sequence derived from human genome
IKLLRNIPRWTHLVRLLRLIILIRIFHLLHQKRQLEKLMRRLVSENKRR

SEQ ID NO: 41012 - protein, 49 aa, Artificial Sequence
  Quasi-synthetic sequence derived from human genome
RRRFSGRPKLSGRLGLLGRRGFSGRLGGYWKTWIFWKTWIFWKTWIFRK

SEQ ID NO: 41013 - protein, 49 aa, Artificial Sequence
  Quasi-synthetic sequence derived from human genome
RKQYRKVLYCVVIIQKNYRAFLLRRRFLHLKKAAIVFQKQLRGQIARRV

SEQ ID NO: 41014 - protein, 49 aa, Artificial Sequence
  Quasi-synthetic sequence derived from human genome
LRAQMLIRIVLFLQKVWRGTLARMRYKRTKAALTIIRYYRRYKVKSYIH

SEQ ID NO: 41015 - protein, 49 aa, Artificial Sequence
  Quasi-synthetic sequence derived from human genome
KFLRRTKAATIIQKYWRMYVVRRRYKIRRAATIVLQSYLRGFLARNRYR

SEQ ID NO: 41016 - protein, 49 aa, Artificial Sequence
  Quasi-synthetic sequence derived from human genome
RKRIQYLHAKLLKKRSKQPLGEVKRRLSLYLTKIHFWLPVLKMIRKKQM

SEQ ID NO: 41017 - protein, 49 aa, Artificial Sequence
  Quasi-synthetic sequence derived from human genome
KAIWWIIRTPILMTILINFLIFIRILGILLSKLRTRQMRCRDYRLRLAR

SEQ ID NO: 41018 - protein, 49 aa, Artificial Sequence
  Quasi-synthetic sequence derived from human genome
LLRILNKLTKWKHSRTMMLVVFKSAPILKRALKVKQAMMQLYVLKLLKV

SEQ ID NO: 41019 - protein, 49 aa, Artificial Sequence
  Quasi-synthetic sequence derived from human genome
RKKRSRIPLLRKRRFQLGRSMNPRARKNRSRIPLLRKRRFQLGRSMNLR

SEQ ID NO: 41020 - protein, 49 aa, Artificial Sequence
  Quasi-synthetic sequence derived from human genome
KKKKKRYLRASSNRNFLLTMRPFLKRAILVLSYVLVILYFRLWIMGGSM

SEQ ID NO: 41021 - protein, 49 aa, Artificial Sequence
  Quasi-synthetic sequence derived from human genome
LLYARLARAYRRSQRASFKRARRPGARALRLVLGIVLLFWACFLPFWLW

SEQ ID NO: 41022 - protein, 49 aa, Artificial Sequence
  Quasi-synthetic sequence derived from human genome
IRLKNIRKVYGRCMWYRLRLLKPQPNIIPTVKKIVLLAGWALFLFLAYK

SEQ ID NO: 41023 - protein, 49 aa, Artificial Sequence
  Quasi-synthetic sequence derived from human genome
HWRQKFLRVKRSAICIQSWWRGTLGRRKAAKRKWAAQTIRRLIRGFVLR

SEQ ID NO: 41024 - protein, 49 aa, Artificial Sequence
  Quasi-synthetic sequence derived from human genome
FSARKGKRKTVKAVIDRFLRLHCGLWVRRKAGYKKKLWKKTPARKKRLR

SEQ ID NO: 41025 - protein, 49 aa, Artificial Sequence
  Quasi-synthetic sequence derived from human genome
REKAARIIQLAVINFLAKQRLRKRVNAALVIQKYWRRVLAQRKLLMLKK

SEQ ID NO: 41026 - protein, 49 aa, Artificial Sequence
  Quasi-synthetic sequence derived from human genome
VLKHARHFRGRKNRCYRLAVRTVIRAFVKCTKARYLKKKNMRTLWINRI

SEQ ID NO: 41027 - protein, 49 aa, Artificial Sequence
  Quasi-synthetic sequence derived from human genome
RRWGQAISKSKLSRRWRRWNRFNRRRCRAAVKSVTFYWLVIVLVFLNTL

SEQ ID NO: 41028 - protein, 49 aa, Artificial Sequence
  Quasi-synthetic sequence derived from human genome
RLQQRLYLQKKIIQKHFEKKKDIRRGIGYLKLICFLIPFLLSLKKKMKV

SEQ ID NO: 41029 - protein, 49 aa, Artificial Sequence
  Quasi-synthetic sequence derived from human genome
VKIFRCPSPIYFANIGFFRRKLIDAVGFSPLRILRKRNKALRKIRKLQK

SEQ ID NO: 41030 - protein, 49 aa, Artificial Sequence
  Quasi-synthetic sequence derived from human genome
RGQRSLLLGPARLCLRLLLLLGYRRRCPPLLRGLVQRWRYGKVCLRSLL

SEQ ID NO: 41031 - protein, 49 aa, Artificial Sequence
  Quasi-synthetic sequence derived from human genome
IIRKYISKYSVFLRHRYQSRSAFLGRYLKKKKSVVSRLKKAKRTAKVLL

SEQ ID NO: 41032 - protein, 49 aa, Artificial Sequence
  Quasi-synthetic sequence derived from human genome
IKLLPLRTFRVFRALKAISVVSRLKVIVGALLRSVKKLVNVIILTFFCL

SEQ ID NO: 41033 - protein, 49 aa, Artificial Sequence
  Quasi-synthetic sequence derived from human genome
LTHLRKRIHRPRRRTTRRWKRWFKFRKRKGEKRPRPNHKAVARRAKLKF

SEQ ID NO: 41034 - protein, 49 aa, Artificial Sequence
  Quasi-synthetic sequence derived from human genome
LRAPRKKIHRRVLKKNPLKNLRIMLKLNPYAKTMRRNTILRQARNHKLR

SEQ ID NO: 41035 - protein, 49 aa, Artificial Sequence
  Quasi-synthetic sequence derived from human genome
KGLLIFLLLVILAMGLWVIRVQKRHKMPRMKKLMRNRMKLRKEAKPGSS

SEQ ID NO: 41036 - protein, 49 aa, Artificial Sequence
  Quasi-synthetic sequence derived from human genome
LLLQKAWRGTLARWRCRRLRAIYTIMRWFRRHKVRAHLAELQRRFQAAR

SEQ ID NO: 41037 - protein, 49 aa, Artificial Sequence
  Quasi-synthetic sequence derived from human genome
MRLGFLRLQALHRSRKLHQQYRLARQRIIQFQARCRAYLVRKAFRHRLW

SEQ ID NO: 41038 - protein, 49 aa, Artificial Sequence
  Quasi-synthetic sequence derived from human genome
RSRIPLLRKRRFQLYRSMNPRARKNRSHIPLVRKRRFQLRRCMNPRARK

SEQ ID NO: 41039 - protein, 49 aa, Artificial Sequence
  Quasi-synthetic sequence derived from human genome
YLRLLVKLYRFLARRTNSTFNQVVLKRLFMSRTNRPPLSLSRMIRKMKL

SEQ ID NO: 41040 - protein, 49 aa, Artificial Sequence
  Quasi-synthetic sequence derived from human genome
RRRKMNHHKYRKLVKKTRFLRRKVQEGRLRRKQIKFEKDLRRIWLKAGL

SEQ ID NO: 41041 - protein, 49 aa, Artificial Sequence
  Quasi-synthetic sequence derived from human genome
WLLRKKYLRMRKAAITMQRYVRGYQARCYAKFLRRTKAATIIQKYWRMY

SEQ ID NO: 41042 - protein, 49 aa, Artificial Sequence
  Quasi-synthetic sequence derived from human genome
PRARKNRSRIPLLRKRRFQLYRSTNPRARKNRSRIPLLRKRRFQLYRSM

SEQ ID NO: 41043 - protein, 49 aa, Artificial Sequence
  Quasi-synthetic sequence derived from human genome
LKVLFKKTHRILRRLFNLCKRCHRQPRFRLPKERSLSYWWNRIQSLLYC

SEQ ID NO: 41044 - protein, 49 aa, Artificial Sequence
  Quasi-synthetic sequence derived from human genome
FVVYSSIVSFYVPFIVTLLVYIKIYIVLRRRRKRVNTKRSSRAFRAHLR

SEQ ID NO: 41045 - protein, 49 aa, Artificial Sequence
  Quasi-synthetic sequence derived from human genome
KKIWWIIRGPMMLCVTVNFFIFLKILKLLISKLKAHQMCFRDYKYRLAK

SEQ ID NO: 41046 - protein, 49 aa, Artificial Sequence
  Quasi-synthetic sequence derived from human genome
KSLRVLRVLRPLKTIKRLPKLKAVFDCVVTSLKNVFNILIVYKLFMFIF

SEQ ID NO: 41047 - protein, 49 aa, Artificial Sequence
  Quasi-synthetic sequence derived from human genome
IIRLMLKYQKILWKVPSFLITQVRRMNEATMLLKKQLPSVRKLLRRKTL

SEQ ID NO: 41048 - protein, 49 aa, Artificial Sequence
  Quasi-synthetic sequence derived from human genome
LLALALVGVLILFMFRRLRQFRQAQPTPQYRFRKRDKVMFYGRKIMRKV

SEQ ID NO: 41049 - protein, 49 aa, Artificial Sequence
  Quasi-synthetic sequence derived from human genome
RTGRRKSWRLEFLFLRRRCFLLTFYLWFLFFSRFLLMLFLPLLTSVVTF

SEQ ID NO: 41050 - protein, 49 aa, Artificial Sequence
  Quasi-synthetic sequence derived from human genome
AARVQRRPWGAWLSARLWKWLKSPRSWRLGLALLLGGALLFWVLLHRRW

SEQ ID NO: 41051 - protein, 49 aa, Artificial Sequence
  Quasi-synthetic sequence derived from human genome
TWIFWKTWIFWKTWIFRKTYIGWKTWIFSGRCGLTGRPGFGGRRRFFWK

SEQ ID NO: 41052 - protein, 49 aa, Artificial Sequence
  Quasi-synthetic sequence derived from human genome
TRQRFLKLKYYSIILQSRIRMIIAVTSYKRYLWATVTIQRHWRAYLRRK

SEQ ID NO: 41053 - protein, 49 aa, Artificial Sequence
  Quasi-synthetic sequence derived from human genome
LFRIVRLARIGRILRLVRAARGIRTLLFALMMSLPSLFNIGLLLFLIMF

SEQ ID NO: 41054 - protein, 49 aa, Artificial Sequence
  Quasi-synthetic sequence derived from human genome
LFRVIRLARIGRILRLIRGAKGIRTLLFALMMSLPALFNIGLLLFLVMF

SEQ ID NO: 41055 - protein, 49 aa, Artificial Sequence
  Quasi-synthetic sequence derived from human genome
TRCLNKIMKTRVCRRLRRANRVLRARCRRAVKSNACYWAVLLLVFLNTL

SEQ ID NO: 41056 - protein, 49 aa, Artificial Sequence
  Quasi-synthetic sequence derived from human genome
RIIWHKFKQWVIPWHLNKRYNRKRFFALPYVDHFLRLEREKRARIKARK

SEQ ID NO: 41057 - protein, 49 aa, Artificial Sequence
  Quasi-synthetic sequence derived from human genome
LFRVIRLARIGRILRLIKGAKGIRTLLFALMMSLPALFNIGLLLFLVMF

SEQ ID NO: 41058 - protein, 49 aa, Artificial Sequence
  Quasi-synthetic sequence derived from human genome
RQCYRTLDRRLRKNLRALVVVHATWYVKAFLALLRPFISSKFTRKIRFL

SEQ ID NO: 41059 - protein, 49 aa, Artificial Sequence
  Quasi-synthetic sequence derived from human genome
LLPLRMPLSRWQRRLRRAARRQVLSGHLPFCRFRLRYPSLSPSAFWVWK

SEQ ID NO: 41060 - protein, 49 aa, Artificial Sequence
  Quasi-synthetic sequence derived from human genome
LFLCGLLSKAKQKLLRHLVPAAALRRKRKALWAHLFSSLRGYLKSLPRV

SEQ ID NO: 41061 - protein, 49 aa, Artificial Sequence
  Quasi-synthetic sequence derived from human genome
RSRIPLLRKRRFQLCRCMNPRARKNRSQIVLFQKLRFQFFCSMSCRAWV

SEQ ID NO: 41062 - protein, 49 aa, Artificial Sequence
  Quasi-synthetic sequence derived from human genome
RSRIPLLRKRRFQLYRSMNSRARKNRSQIVLFQKRRFHFFCSMSCRAWV

SEQ ID NO: 41063 - protein, 49 aa, Artificial Sequence
  Quasi-synthetic sequence derived from human genome
KAKQRLKRLRNIHYLFNTALFLIAWRLLIARSQMARNVWFFIVSFCYKF

SEQ ID NO: 41064 - protein, 49 aa, Artificial Sequence
  Quasi-synthetic sequence derived from human genome
MNPRARKNRSRIPLLRKRRFQLYRSTNPRARKNRSRIPLLRKHRFQLYR

SEQ ID NO: 41065 - protein, 49 aa, Artificial Sequence
  Quasi-synthetic sequence derived from human genome
RSRIPLLRKRRFQLGRSMNLRARKNRSQIVLFQKRRFQFFCSMSGRAWV

SEQ ID NO: 41066 - protein, 49 aa, Artificial Sequence
  Quasi-synthetic sequence derived from human genome
PYKTMKFILWRRFRWAIILFIILFILLLFLAIFIYAFPNYAAMKLVKPF

SEQ ID NO: 41067 - protein, 49 aa, Artificial Sequence
  Quasi-synthetic sequence derived from human genome
LVCLCLLQAFGYRLRRVIAAFYFPKREKKRILFLYNDLLKKRAAFTKLR

SEQ ID NO: 41068 - protein, 49 aa, Artificial Sequence
  Quasi-synthetic sequence derived from human genome
KAFLRLKRKFIQMRRPFLERRDLIIQHIPGFWVKAFLNHPRISILINRR

SEQ ID NO: 41069 - protein, 49 aa, Artificial Sequence
  Quasi-synthetic sequence derived from human genome
RRIKLSPLMMYEKLSMIRFRYRILRSQHFRTKSKVCKLRKAQRSWVQKV

SEQ ID NO: 41070 - protein, 49 aa, Artificial Sequence
  Quasi-synthetic sequence derived from human genome
RSHIPLVRKRRFQLRRCMNPRARKNRSQIVLFQKRRFHFFCSMSCRAWV

SEQ ID NO: 41071 - protein, 49 aa, Artificial Sequence
  Quasi-synthetic sequence derived from human genome
RCLGRREYVKKRQAAIKLEAHWRGALARKAIQRRKWAVRIIRKFIKGFI

SEQ ID NO: 41072 - protein, 49 aa, Artificial Sequence
  Quasi-synthetic sequence derived from human genome
IKLYWWRFLSMWGMFSVITSYILFRATRKPLSGRTPRLVYKWFLLIYKL

SEQ ID NO: 41073 - protein, 49 aa, Artificial Sequence
  Quasi-synthetic sequence derived from human genome
WKTLQKKKQQKIKEKLRIRTKAAVKIQAWWRGTLVRRTLLHAALRAWII

SEQ ID NO: 41074 - protein, 49 aa, Artificial Sequence
  Quasi-synthetic sequence derived from human genome
MLLFLSVPQPRPPGARTRAGAARVARWRRLRLQQLRRLRGLLRVLRGRP

SEQ ID NO: 41075 - protein, 49 aa, Artificial Sequence
  Quasi-synthetic sequence derived from human genome
KFKLFTLVSACIPVFRLARRRKKILFYCHFPDLLLTKRDSFLKRLYRAP

SEQ ID NO: 41076 - protein, 49 aa, Artificial Sequence
  Quasi-synthetic sequence derived from human genome
LGRYAEQMNVRMPFRRKIYYLPRRYKFMSRIDKQISRFRRWLPKKPMRL

SEQ ID NO: 41077 - protein, 49 aa, Artificial Sequence
  Quasi-synthetic sequence derived from human genome
WRRRSCWRKWKQLSRLQRNMILFLLAFLLFCGLLFYINLADHWKALAFR

SEQ ID NO: 41078 - protein, 49 aa, Artificial Sequence
  Quasi-synthetic sequence derived from human genome
LKKKRRNFAELKIKRLRKKFAQKMLRKARRKLIYEKAKHYHKEYRQMYR

SEQ ID NO: 41079 - protein, 49 aa, Artificial Sequence
  Quasi-synthetic sequence derived from human genome
FGKTKIFFRAGQVAYLEKLRADKLRAACIRIQKTIRGWLLRKKYLRMRK

SEQ ID NO: 41080 - protein, 49 aa, Artificial Sequence
  Quasi-synthetic sequence derived from human genome
KAKRCNRRLKSQILLKKYLMKRRWKKNFIAVSAANRFKKISSSGALMAL

SEQ ID NO: 41081 - protein, 49 aa, Artificial Sequence
  Quasi-synthetic sequence derived from human genome
PRLPVKKIRKQMKLLLLLLLLSCAAWLTYVHLGLVRQGRALRQRLGYGR

SEQ ID NO: 41082 - protein, 49 aa, Artificial Sequence
  Quasi-synthetic sequence derived from human genome
LVKPKIVKKRTKKFIRHQSDRYVKIKRNWRKPRGIDNRVRRRFKGQILM

SEQ ID NO: 41083 - protein, 49 aa, Artificial Sequence
  Quasi-synthetic sequence derived from human genome
LWRRQIYAVATLRFLKLRRERRALLCLLLVLGIAFIPIILEKIMYKVTR

SEQ ID NO: 41084 - protein, 49 aa, Artificial Sequence
  Quasi-synthetic sequence derived from human genome
RRRFISLKKATIFVQRKYRATICAKHKLYQFLHLRKAAITIQSSYRRLM

SEQ ID NO: 41085 - protein, 49 aa, Artificial Sequence
  Quasi-synthetic sequence derived from human genome
IVAAMRRIRYEFKAKNIKKKKVSIMVSVDGVKVILKKKKKLLLLQKKEW

SEQ ID NO: 41086 - protein, 49 aa, Artificial Sequence
  Quasi-synthetic sequence derived from human genome
RVRFLNLKKTIIKFQAHVRKHQQRQKYKKMKKAAVIIQTHFRAYIFAMK

SEQ ID NO: 41087 - protein, 49 aa, Artificial Sequence
  Quasi-synthetic sequence derived from human genome
VTNKYPRGVGWRILKVLLWLLAILTGLIAGKFLFHQRLFGQLLRLKMFR

SEQ ID NO: 41088 - protein, 49 aa, Artificial Sequence
  Quasi-synthetic sequence derived from human genome
IPRWTHLLRLLRLIILLRIFHLFHQKRQLEKLIRRRVSENKRRYTRDGF

SEQ ID NO: 41089 - protein, 49 aa, Artificial Sequence
  Quasi-synthetic sequence derived from human genome
AAMKIQATWKCYKARKFFLFYRQQKWASGVIAIAWLLYCHKTRLKKILK

SEQ ID NO: 41090 - protein, 49 aa, Artificial Sequence
  Quasi-synthetic sequence derived from human genome
KTVKKKIKPTLPLRIFINVSRFFCVQLKKMVRLMYINSFISFPLNIVVL

SEQ ID NO: 41091 - protein, 49 aa, Artificial Sequence
  Quasi-synthetic sequence derived from human genome
HFILTNPRSLKHLCRLKIRKCMGRLHLRCPVFMSFLPLPNRLKAYVLYK

SEQ ID NO: 41092 - protein, 49 aa, Artificial Sequence
  Quasi-synthetic sequence derived from human genome
TLKSRKRRKMSKKLPPVIIKYIIINRFRGRKNMLVKLGKIDSKEKQVIL

SEQ ID NO: 41093 - protein, 49 aa, Artificial Sequence
  Quasi-synthetic sequence derived from human genome
KSLRVLRVLRPLKTIKRLPKLKAVFDCVVNSLKNVFNILIVYMLFMFIF

SEQ ID NO: 41094 - protein, 49 aa, Artificial Sequence
  Quasi-synthetic sequence derived from human genome
KSLRVLRVLRPLKTIKRLPKLKAVFDCVVNSLKNVLNILIVYMLFMFIF

SEQ ID NO: 41095 - protein, 49 aa, Artificial Sequence
  Quasi-synthetic sequence derived from human genome
YKQRLLFAKLFGHLTSARRARKSEVPHFRLKKVQNIKMWLSLRSYLKRR

SEQ ID NO: 41096 - protein, 49 aa, Artificial Sequence
  Quasi-synthetic sequence derived from human genome
RPVLWHWLLRTGGWKVSAVTLAYLIFCLCSLVGILHLQRALVLRRKRKR

SEQ ID NO: 41097 - protein, 49 aa, Artificial Sequence
  Quasi-synthetic sequence derived from human genome
PRSKILTVRVILAPWKKGLIAVVIIGVIIALLIIAAKCYFLRKAKAKQM

SEQ ID NO: 41098 - protein, 49 aa, Artificial Sequence
  Quasi-synthetic sequence derived from human genome
RRCKKRMFKFHQMKHIFEILDKMRCLRKRSTVSFLGVLVIFLLFMNLYI

SEQ ID NO: 41099 - protein, 49 aa, Artificial Sequence
  Quasi-synthetic sequence derived from human genome
VPFAIIGLCYSLIVRVLVRAHRHRGLRPRRQKALRMILAVVLVFFVCWL

SEQ ID NO: 41100 - protein, 49 aa, Artificial Sequence
  Quasi-synthetic sequence derived from human genome
RYAAIVHPLRLRHLRRPRVARLLCLGVWALILVFAVPAARVHRPSRCRY

SEQ ID NO: 41101 - protein, 49 aa, Artificial Sequence
  Quasi-synthetic sequence derived from human genome
FPRRPRIHFRFPNRPFVPSRCNHRFPFQPFYWPHRYLTYRYFPRRRLQR

SEQ ID NO: 41102 - protein, 49 aa, Artificial Sequence
  Quasi-synthetic sequence derived from human genome
AFRGMKTRRHLKSMHSSATLIQSRFRSLLVRRRFISLKKATIFVQRKYR

SEQ ID NO: 41103 - protein, 49 aa, Artificial Sequence
  Quasi-synthetic sequence derived from human genome
RPIGKAKPKKQSKKKVPFWNVQNKIILFTVFLFILAVIAWTLLWLYISK

SEQ ID NO: 41104 - protein, 49 aa, Artificial Sequence
  Quasi-synthetic sequence derived from human genome
KYWRRVLAQRKLLMLKKEKLEKVQNKAASLIQAMWRRYRAKKYLCKVKA

SEQ ID NO: 41105 - protein, 49 aa, Artificial Sequence
  Quasi-synthetic sequence derived from human genome
HKIIAGSVALFLSVLVILLVIYVSWKRYPASMKQLQQRSLMRRHRKKKR

SEQ ID NO: 41106 - protein, 49 aa, Artificial Sequence
  Quasi-synthetic sequence derived from human genome
RALALFVITCLVIFVLVHSFLKKLLGKKLTRCLKPFENSRLRLWTKWVF

SEQ ID NO: 41107 - protein, 49 aa, Artificial Sequence
  Quasi-synthetic sequence derived from human genome
FLARNRYRKILREHKAVIIQKRVRGWLARTHYKRSMHAIIYLQCCFRRM

SEQ ID NO: 41108 - protein, 49 aa, Artificial Sequence
  Quasi-synthetic sequence derived from human genome
YKQRFLFAKLFSHITSARKARKYEIPHFRLKKVENIKIWLSLRSYLKRR

SEQ ID NO: 41109 - protein, 49 aa, Artificial Sequence
  Quasi-synthetic sequence derived from human genome
PRARKNRSRIPLLRKHRFQLYRSMNSRARKNRSQIVLFQKRRFHFFCSM

SEQ ID NO: 41110 - protein, 49 aa, Artificial Sequence
  Quasi-synthetic sequence derived from human genome
RRQKLLLAQLHHRKRVKAAGQIQAWWRGVLVRRTLLVAALRAWMIQCWW

SEQ ID NO: 41111 - protein, 49 aa, Artificial Sequence
  Quasi-synthetic sequence derived from human genome
LKRALKVKQAMLQLYVLKLLKLQTKYLGRQWRKSNMKTMSAIYQKVRHR

SEQ ID NO: 41112 - protein, 49 aa, Artificial Sequence
  Quasi-synthetic sequence derived from human genome
RGFLARRRYRKMLEEHKAVILQKYARAWLARRRFQSIRRFVLNIQLTYR

SEQ ID NO: 41113 - protein, 49 aa, Artificial Sequence
  Quasi-synthetic sequence derived from human genome
RSAAVFIQAWWRGMLVRRTLLHAALRAWIIQCWWRQVLEKLLAKRRRMV

SEQ ID NO: 41114 - protein, 49 aa, Artificial Sequence
  Quasi-synthetic sequence derived from human genome
LIRANYWLKLVKGILPLVGMAMVPALLGLIGYHLYRKANRPKVSKKKLK

SEQ ID NO: 41115 - protein, 49 aa, Artificial Sequence
  Quasi-synthetic sequence derived from human genome
KLLILLLGSWALFFRRPKASLPRVFVLRALLMVLVFLLVVSYWLFYGVR

SEQ ID NO: 41116 - protein, 49 aa, Artificial Sequence
  Quasi-synthetic sequence derived from human genome
KTFLPKCIRAKIQDYHILTRKRIRYRFRRFIQQFSQCKATARNLKLKYL

SEQ ID NO: 41117 - protein, 49 aa, Artificial Sequence
  Quasi-synthetic sequence derived from human genome
YFALRRKKKKTIKMLMLVVVLFALCWFPLNCYVLLLSSKVIRTNNALYF

SEQ ID NO: 41118 - protein, 49 aa, Artificial Sequence
  Quasi-synthetic sequence derived from human genome
RWEGSAPRRLLLALHRRLRGLRRAAAGTSRLLFQRLLPCGVIKFRYIWI

SEQ ID NO: 41119 - protein, 49 aa, Artificial Sequence
  Quasi-synthetic sequence derived from human genome
KLFIRSPRTLVTLEQSRARLIPIIVLLLQKAWRGTLARWRCRRLRAIYT

SEQ ID NO: 41120 - protein, 49 aa, Artificial Sequence
  Quasi-synthetic sequence derived from human genome
RMPEKVTWMRRMRILRRLLRRYRESKKIDRHMYHSLYLKVKGNVFKNKR

SEQ ID NO: 41121 - protein, 49 aa, Artificial Sequence
  Quasi-synthetic sequence derived from human genome
LIKPFGARKKRSWYLTWKYKLTNQRALRRFCQTGAVLFLLVTVIVNIKL

SEQ ID NO: 41122 - protein, 49 aa, Artificial Sequence
  Quasi-synthetic sequence derived from human genome
RARPGAWRRDIFGRIIWHKFKQWVIPWHLNKRYNRKRFFALPYVDHFLR

SEQ ID NO: 41123 - protein, 49 aa, Artificial Sequence
  Quasi-synthetic sequence derived from human genome
WRHFHTLRMTIFCLVLPLLVMAICYTGIIKTLLRCPSKKKYKAIRLIFV

SEQ ID NO: 41124 - protein, 49 aa, Artificial Sequence
  Quasi-synthetic sequence derived from human genome
FKIVWSLRRRQQLARQARMKKATRFIMVVAIVFITCYLPSVSARLYFLW

SEQ ID NO: 41125 - protein, 49 aa, Artificial Sequence
  Quasi-synthetic sequence derived from human genome
VNKFLSLANKRLPVKRAAVQFLNNAWGIQKKQNAKRFKRRWMVRKMKTK

SEQ ID NO: 41126 - protein, 49 aa, Artificial Sequence
  Quasi-synthetic sequence derived from human genome
VFIARKLQKNLKTGSFLNRLGKLLLHLFMVLCLTLFLNNIIKKILNLKS

SEQ ID NO: 41127 - protein, 49 aa, Artificial Sequence
  Quasi-synthetic sequence derived from human genome
VLKVIRTGKRKKKAWKRMVTKVCFVGDGFTRKPPKYERFIRPMGLRFKK

SEQ ID NO: 41128 - protein, 49 aa, Artificial Sequence
  Quasi-synthetic sequence derived from human genome
KVFHKYSNRNKVRHTKKKTFKCIKCSKSFFMLSCLIRHKRIHIRQNIYK

SEQ ID NO: 41129 - protein, 49 aa, Artificial Sequence
  Quasi-synthetic sequence derived from human genome
NKLFMRMASKQLRENVLVKRKRTKGKKLLLSIGVLLHKWKNVCIVLTAL

SEQ ID NO: 41130 - protein, 49 aa, Artificial Sequence
  Quasi-synthetic sequence derived from human genome
LLKKRAAFTKLRRAAILRRERQQKAPRHPLADILHRGCPLLRRWLCRRC

SEQ ID NO: 41131 - protein, 49 aa, Artificial Sequence
  Quasi-synthetic sequence derived from human genome
KGLIQGAIYAGIVIALLFLCLLPLIVKHIRKKQAKKAAAIRAKKSSKVR

SEQ ID NO: 41132 - protein, 49 aa, Artificial Sequence
  Quasi-synthetic sequence derived from human genome
RAMKGKKPSFMVIRFPGRRGYGRLRPRARSLSKASTAINWLTKKFLLKK

SEQ ID NO: 41133 - protein, 49 aa, Artificial Sequence
  Quasi-synthetic sequence derived from human genome
LVTRISILLRDLPTLKAAVIVAFAFTTLLIACLLLRVFRSGKRLKKTRK

SEQ ID NO: 41134 - protein, 49 aa, Artificial Sequence
  Quasi-synthetic sequence derived from human genome
ARKHLNKLRNIRYGFNTILVILIWRIFIARSQMARNIWYFVVSLCYKFL

SEQ ID NO: 41135 - protein, 49 aa, Artificial Sequence
  Quasi-synthetic sequence derived from human genome
KKIDVIRRKVSKIQRFHARSLWTNHKRYGYKKHSYRLVKKLKLQKMKKN

SEQ ID NO: 41136 - protein, 49 aa, Artificial Sequence
  Quasi-synthetic sequence derived from human genome
LLLLLVVCGIGCVWHWKHRVATRFTLPRFLQRRSSRRKVCTKTFLGPRI

SEQ ID NO: 41137 - protein, 49 aa, Artificial Sequence
  Quasi-synthetic sequence derived from human genome
VKLHWWRFLVIWILFSAVTAFVTFRATRKPLVQTTPRLVYKWFLLIYKI

SEQ ID NO: 41138 - protein, 49 aa, Artificial Sequence
  Quasi-synthetic sequence derived from human genome
LRSKKAVWHKLLSKQRKRAVVACFRMAPLYNLPRHRSINLFLHGYQRFW

SEQ ID NO: 41139 - protein, 49 aa, Artificial Sequence
  Quasi-synthetic sequence derived from human genome
RIHLKLHFTCQRILFLKPSCMLEVITWPIQAFVKRKVIIFLKKCLLCKV

SEQ ID NO: 41140 - protein, 49 aa, Artificial Sequence
  Quasi-synthetic sequence derived from human genome
IALRWVRLLGFAIVYGTIILKLYRVLQLFLSRTAQRSALLSSGRLLRRL

SEQ ID NO: 41141 - protein, 49 aa, Artificial Sequence
  Quasi-synthetic sequence derived from human genome
RSWCLCKLLRFFYSLFFPGLIVCGTLCVCLVIVLWGIRLLLQRKKKLVS

SEQ ID NO: 41142 - protein, 49 aa, Artificial Sequence
  Quasi-synthetic sequence derived from human genome
IVSQRKQIKRKAPRGFLKRVFKRKKPQLRLEKSGDLLVHLNCLLFVHRL

SEQ ID NO: 41143 - protein, 49 aa, Artificial Sequence
  Quasi-synthetic sequence derived from human genome
YRRRCCRLCIWLLQTLVHLLQLGQVWRYLRALYLGLQSRWRGERLRRHF

SEQ ID NO: 41144 - protein, 49 aa, Artificial Sequence
  Quasi-synthetic sequence derived from human genome
MRRLRRLAHLVLFCPFSKRLQGRLPGLRVRCIFLAWLGVFAGSWLVYVH

SEQ ID NO: 41145 - protein, 49 aa, Artificial Sequence
  Quasi-synthetic sequence derived from human genome
MRKSQILISSWFRGNMQKKCYGKIKASVLLIQAFVRGWKARKNYRKYFR

SEQ ID NO: 41146 - protein, 49 aa, Artificial Sequence
  Quasi-synthetic sequence derived from human genome
LRTLFRSRSKRRHRTVKLIFAIVVAYFLSWGPYNFTLFLQTLFRTQIIR

SEQ ID NO: 41147 - protein, 49 aa, Artificial Sequence
  Quasi-synthetic sequence derived from human genome
RVKAAPGPKAALAVIRGGATRAAGVFYPWRFRLLCLLRRWLPRPRAWFI

SEQ ID NO: 41148 - protein, 49 aa, Artificial Sequence
  Quasi-synthetic sequence derived from human genome
LSVIKLKNKIKYRAEACIKMQKTIRMWLCKRRHKPRIDGLVKVGTLKKR

SEQ ID NO: 41149 - protein, 49 aa, Artificial Sequence
  Quasi-synthetic sequence derived from human genome
FRLQRALRFLLGRLPWRVASGARRFRRWLNRYSYTVLSSWPERALISLK

SEQ ID NO: 41150 - protein, 49 aa, Artificial Sequence
  Quasi-synthetic sequence derived from human genome
KYWRRVLAQRKLLMLKKEKLEKVQNKAASLIQGYWRRYSTRQRFLKLKY

SEQ ID NO: 41151 - protein, 49 aa, Artificial Sequence
  Quasi-synthetic sequence derived from human genome
RMYQPLTEDEIRIFKRKKRIKRRALLFLSYILTHFIFLALLLILIVLLR

SEQ ID NO: 41152 - protein, 49 aa, Artificial Sequence
  Quasi-synthetic sequence derived from human genome
RPKKRAKTITFSKNAVISKRGGKLCLLIRVANLRKSLLIGSHIYGKLLK

SEQ ID NO: 41153 - protein, 49 aa, Artificial Sequence
  Quasi-synthetic sequence derived from human genome
RLWGRRKCKPQMNYDKLSRALRYYYNKRILHKTKGKRFTYKFNFSKLIV

SEQ ID NO: 41154 - protein, 49 aa, Artificial Sequence
  Quasi-synthetic sequence derived from human genome
LRIIRLVRVFRIFKLSRHSKGLQILGHTLRASMRELGLLIFFLFIGVIL

SEQ ID NO: 41155 - protein, 49 aa, Artificial Sequence
  Quasi-synthetic sequence derived from human genome
FLLLVPLLVLALASYRRLCLRLRLADCLVPYSRALYRRRRAPQPRQIRA

SEQ ID NO: 41156 - protein, 49 aa, Artificial Sequence
  Quasi-synthetic sequence derived from human genome
MWKGKTLRRQLQRQHKCAIIIQSYYRMHVQQKKWKIMKKAALLIQKYYR

SEQ ID NO: 41157 - protein, 49 aa, Artificial Sequence
  Quasi-synthetic sequence derived from human genome
MKLKLNVLTIILLPVHLLITIYSALIFIPWYFLTNAKKKNAMAKRIKAK

SEQ ID NO: 41158 - protein, 49 aa, Artificial Sequence
  Quasi-synthetic sequence derived from human genome
LPRMQARMRGFQARKRYLRRRAALGQLNTILLVAQPLLQRRQRLQLGRW

SEQ ID NO: 41159 - protein, 49 aa, Artificial Sequence
  Quasi-synthetic sequence derived from human genome
LIILFYQKVIKYIWRIGTDGRTVRRTMNIVPRTKVKTIKMFLILNLLFL

SEQ ID NO: 41160 - protein, 49 aa, Artificial Sequence
  Quasi-synthetic sequence derived from human genome
IYILVCLFFVFLSLLEYVYINYLFYSRGPRRQPRRHRRPRRVIARYRYQ

SEQ ID NO: 41161 - protein, 49 aa, Artificial Sequence
  Quasi-synthetic sequence derived from human genome
RIIWSLRQRQMDRHAKIKRAITFIMVVAIVFVICFLPSVVVRIRIFWLL

SEQ ID NO: 41162 - protein, 49 aa, Artificial Sequence
  Quasi-synthetic sequence derived from human genome
ASLIQAMWRRYRAKKYLCKVKAACKIQAWYRCWRAHKEYLAILKAVKII

SEQ ID NO: 41163 - protein, 49 aa, Artificial Sequence
  Quasi-synthetic sequence derived from human genome
FWLIFLLIILSYIKIGKNLLRISKRRSKFPNSGKYATTARNSFIVLIIF

SEQ ID NO: 41164 - protein, 49 aa, Artificial Sequence
  Quasi-synthetic sequence derived from human genome
VAVVVTAVLILLVVRRLRVPKTPAPDGPRYRFRKRDKVLFYGRKIMRKV

SEQ ID NO: 41165 - protein, 49 aa, Artificial Sequence
  Quasi-synthetic sequence derived from human genome
IPKRKRKAKKRRKNDVVVVKGKLKLCSISGLIALCGILVLLVGIAMAVV

SEQ ID NO: 41166 - protein, 49 aa, Artificial Sequence
  Quasi-synthetic sequence derived from human genome
LRALRLLRIFKVTKYWSSLRNLVVSLLNSMKSIISLLFLLFLFIVVFAL

SEQ ID NO: 41167 - protein, 49 aa, Artificial Sequence
  Quasi-synthetic sequence derived from human genome
IGWLKKCYQMIDRRLRKNLKSLIIVHPSWFIRTVLAISRPFISVKFINK

SEQ ID NO: 41168 - protein, 49 aa, Artificial Sequence
  Quasi-synthetic sequence derived from human genome
RQWRAVMLIQAAIRSWLTRKHIQRLHAAATVIKRAWQKWRIRMACLAAK

SEQ ID NO: 41169 - protein, 49 aa, Artificial Sequence
  Quasi-synthetic sequence derived from human genome
LLRKVRAKETRKRALSRLKLKLNKDIVISVGIYNLVQKALKPPPIKLYR

SEQ ID NO: 41170 - protein, 49 aa, Artificial Sequence
  Quasi-synthetic sequence derived from human genome
GVLLRRVTRNLVRNKLAVITRLLQNLIMGLFLLFFVLRVRSNVLKGAIQ

SEQ ID NO: 41171 - protein, 49 aa, Artificial Sequence
  Quasi-synthetic sequence derived from human genome
IIIMYFIFTSMAGIRNIGIWFFWIRLYKIRRGRTRPQALLFLCMILLLI

SEQ ID NO: 41172 - protein, 49 aa, Artificial Sequence
  Quasi-synthetic sequence derived from human genome
RKKPLPWRSPLLLLAMWGPQAPPCLCRKRGRGACIKCERLRPRIRRRGL

SEQ ID NO: 41173 - protein, 49 aa, Artificial Sequence
  Quasi-synthetic sequence derived from human genome
RFLLRVRCWQYRQLSALHRAPRPTRPDKARRLGYKAKQGYVIYRIRVRR

SEQ ID NO: 41174 - protein, 49 aa, Artificial Sequence
  Quasi-synthetic sequence derived from human genome
KVMFYGRKIMRKVTTLPNTLVENTALPRQRARKRTKVLSLAKRILRFKK

SEQ ID NO: 41175 - protein, 49 aa, Artificial Sequence
  Quasi-synthetic sequence derived from human genome
RLARAASRLAFQGWLRRGVLLVRAPPACLQVLRDAWRRRALRPPRGFRI

SEQ ID NO: 41176 - protein, 49 aa, Artificial Sequence
  Quasi-synthetic sequence derived from human genome
RILAVITIQAGVRGYLARRRIRLWHRGAMVIQATWRGYRVRRNLAHLCR

SEQ ID NO: 41177 - protein, 49 aa, Artificial Sequence
  Quasi-synthetic sequence derived from human genome
LRRLRAVRLRSGAKALGKARRKVTVLVLVVLAVCLLCWTPFHLASVVAL

SEQ ID NO: 41178 - protein, 49 aa, Artificial Sequence
  Quasi-synthetic sequence derived from human genome
ASLIFSAILKSLQSYFSPTLFRVIRLARIGRILRLIRAAKGIRTLLFAL

SEQ ID NO: 41179 - protein, 49 aa, Artificial Sequence
  Quasi-synthetic sequence derived from human genome
LRGKMMQRRPRSAEVKYFYFFKILLRLRLAILKYLFIDDKGILFVSSRK

SEQ ID NO: 41180 - protein, 49 aa, Artificial Sequence
  Quasi-synthetic sequence derived from human genome
KILCHKFMRFMMMRAENFFILRRKPVEQKKIFTIQGCYPVIRCLLRRRG

SEQ ID NO: 41181 - protein, 49 aa, Artificial Sequence
  Quasi-synthetic sequence derived from human genome
RRPRPRRELSLGRKKAPHRLCGRFSRISMKLPRIPLRRQKLPKVVVAHH

SEQ ID NO: 41182 - protein, 49 aa, Artificial Sequence
  Quasi-synthetic sequence derived from human genome
IKPGIKIFRFVAPLYYINKECFKSALYKQTVNPILIKVAWKKAAKRKIK

SEQ ID NO: 41183 - protein, 49 aa, Artificial Sequence
  Quasi-synthetic sequence derived from human genome
ARRASRGPIAFWARRASRTRLAAWARRALLSLRSPKARRGKARRRAAKL

SEQ ID NO: 41184 - protein, 49 aa, Artificial Sequence
  Quasi-synthetic sequence derived from human genome
RLARIGRILRLIKGAKGIRTLLFALMMSLPALFNIGLLLFLVMFIFSIF

SEQ ID NO: 41185 - protein, 49 aa, Artificial Sequence
  Quasi-synthetic sequence derived from human genome
KRALKVKQAMMQLYVLKLLKVQTKYLGRQWRKSNMKTMSAIYQKVRHRL

SEQ ID NO: 41186 - protein, 49 aa, Artificial Sequence
  Quasi-synthetic sequence derived from human genome
ARLFRIKCVTRIQAYWRGCVVRKWYRNLRKTVPPTDAKLRKKFFEKKFT

SEQ ID NO: 41187 - protein, 49 aa, Artificial Sequence
  Quasi-synthetic sequence derived from human genome
KGFIQKRKFQEIKNSTIKIQAMWRRYRAKKYLCKVKAACKIQAWYRCWR

SEQ ID NO: 41188 - protein, 49 aa, Artificial Sequence
  Quasi-synthetic sequence derived from human genome
RLWGRRKCKPQMNYDKLSRALRYYYNKRILHKTKGKRFTYKFNFNKLVM

SEQ ID NO: 41189 - protein, 49 aa, Artificial Sequence
  Quasi-synthetic sequence derived from human genome
LSFLRLFRAARLIKLLRQGYTIRILLWTFVQSFKALPYVCLLIAMLFFI

SEQ ID NO: 41190 - protein, 49 aa, Artificial Sequence
  Quasi-synthetic sequence derived from human genome
RLWGVRKCKPQMNYDKLSRALRYYYNKRILHKTKGKRFTYKFNFNKLVL

SEQ ID NO: 41191 - protein, 49 aa, Artificial Sequence
  Quasi-synthetic sequence derived from human genome
WSLRRRPARTLGLLLLVVLGFLVLRRLDWSTLVPLRLRHRQLGLQAKGW

SEQ ID NO: 41192 - protein, 49 aa, Artificial Sequence
  Quasi-synthetic sequence derived from human genome
FMCGAILAKISRPKKRAKTITFSKNAVISKRGGKLCLLIRVANLRKSLL

SEQ ID NO: 41193 - protein, 49 aa, Artificial Sequence
  Quasi-synthetic sequence derived from human genome
GVLKRPARLPCSHIFCKKCILRWLARQKTCPCCRKEVKRKKVVHMNKLR

SEQ ID NO: 41194 - protein, 49 aa, Artificial Sequence
  Quasi-synthetic sequence derived from human genome
RLASHCLAYANSCLNPLVYALASRHFRARFRRLWPCGRRRRHRARRALR

SEQ ID NO: 41195 - protein, 49 aa, Artificial Sequence
  Quasi-synthetic sequence derived from human genome
TRRKMPSLGWLRKCYQQIDRRLRKNLKSLIIVHPSWFIRTLLAVTRPFI

SEQ ID NO: 41196 - protein, 49 aa, Artificial Sequence
  Quasi-synthetic sequence derived from human genome
KLKRNMMPWALQKKREIHMAKAHRRRAARSALPMRLTSCIFRRPVTRIR

SEQ ID NO: 41197 - protein, 49 aa, Artificial Sequence
  Quasi-synthetic sequence derived from human genome
KYHRFLGRHFPRFYVLYTIFMKGLQMLWADAKKARRIKTNMWKHNIKFH

SEQ ID NO: 41198 - protein, 49 aa, Artificial Sequence
  Quasi-synthetic sequence derived from human genome
LPRRRGRPSRRFLGKKYRKYYYKSPKPLLRPFLCRICGSRFLSHEDLRF

SEQ ID NO: 41199 - protein, 49 aa, Artificial Sequence
  Quasi-synthetic sequence derived from human genome
KWKIFTNFKMNILGLLIPFTIFMFCYIKILHQLKRCQNHNKTKAIRLVL

SEQ ID NO: 41200 - protein, 49 aa, Artificial Sequence
  Quasi-synthetic sequence derived from human genome
RFQQFLFAFFIFIMSLLLISGQRPVNLTMRRKLRKHNCLQRRCMPLHSR

SEQ ID NO: 41201 - protein, 49 aa, Artificial Sequence
  Quasi-synthetic sequence derived from human genome
RFLFNELRPAVCNDLSIMSKFKLLSSLPRWRRIAQKIIRERRKKRVPKK

SEQ ID NO: 41202 - protein, 49 aa, Artificial Sequence
  Quasi-synthetic sequence derived from human genome
WMKKCYQMIDRRLRKNLKSFIIVHPSWFIRTILAVTRPFISSKFSSKIK

SEQ ID NO: 41203 - protein, 49 aa, Artificial Sequence
  Quasi-synthetic sequence derived from human genome
WLARLLRSRAGSRKRPLTLLQRAGLLLLLGLLGFLALLALMSRLGRAAA

SEQ ID NO: 41204 - protein, 49 aa, Artificial Sequence
  Quasi-synthetic sequence derived from human genome
WKLFQALKLNLFGLVLPLLVMIICYTGIIKILLRRPNEKKSKAVRLIFV

SEQ ID NO: 41205 - protein, 49 aa, Artificial Sequence
  Quasi-synthetic sequence derived from human genome
ILKGKKCIVLVTELMTSGTLKTYLKRFKVMKPKVLRSWCRQILKGLQFL

SEQ ID NO: 41206 - protein, 49 aa, Artificial Sequence
  Quasi-synthetic sequence derived from human genome
WLRKCYQQIDRRLRKNLKSLIIVHPSWFIRTLLAVTRPFISSKFSQKIR

SEQ ID NO: 41207 - protein, 49 aa, Artificial Sequence
  Quasi-synthetic sequence derived from human genome
RPKGYRKLLALGTWLLALLLTLPVMLAMRLVRRGPKSLCLPAWGPRAHR

SEQ ID NO: 41208 - protein, 49 aa, Artificial Sequence
  Quasi-synthetic sequence derived from human genome
CRGYLARKAFAKKQQQLSALKVLQRNCAAYLKLRHWQWWRVFTKVKPLL

SEQ ID NO: 41209 - protein, 49 aa, Artificial Sequence
  Quasi-synthetic sequence derived from human genome
LRVIRLVRVFRIFKLSRHSKGLQILGKTLQASMRELGLLIFFLFIGVIL

SEQ ID NO: 41210 - protein, 49 aa, Artificial Sequence
  Quasi-synthetic sequence derived from human genome
LRVIRLVRVFRIFKLSRHSKGLQILGQTLKASMRELGLLIFFLFIGVIL

SEQ ID NO: 41211 - protein, 49 aa, Artificial Sequence
  Quasi-synthetic sequence derived from human genome
RRRFLSLKKTAILIQRKYRAHLCTKHHLQFLQVQNAVIKIQSSYRRWMI

SEQ ID NO: 41212 - protein, 49 aa, Artificial Sequence
  Quasi-synthetic sequence derived from human genome
RLARIGRILRLIRGAKGIRTLLFALMMSLPALFNIGLLLFLVMFIYSIF

SEQ ID NO: 41213 - protein, 49 aa, Artificial Sequence
  Quasi-synthetic sequence derived from human genome
MRRHFRMKLRNLFTKFIRKFGFELVKRLLPEEYHRVLVNIRKAEARAKR

SEQ ID NO: 41214 - protein, 49 aa, Artificial Sequence
  Quasi-synthetic sequence derived from human genome
CRGYLARKAFAKRQQQLTAMKVLQRNCAAYLKLRNWQWWRLFTKVKPLL

SEQ ID NO: 41215 - protein, 49 aa, Artificial Sequence
  Quasi-synthetic sequence derived from human genome
FLKLFRAARLIKLLRQGYTIRILLWTFVQSFKALPYVCLLIAMLFFIYA

SEQ ID NO: 41216 - protein, 49 aa, Artificial Sequence
  Quasi-synthetic sequence derived from human genome
LRSARRRRRGRTDGRRFLLRRAVPGHLGLARARVERAWLAAGLLKVPLR

SEQ ID NO: 41217 - protein, 49 aa, Artificial Sequence
  Quasi-synthetic sequence derived from human genome
QMNVRMPFRRKIYYLPRRYKFMSRIDKQISRFRRWLPKKPMRLDKETLP

SEQ ID NO: 41218 - protein, 49 aa, Artificial Sequence
  Quasi-synthetic sequence derived from human genome
PRFIGNWWSGFLLCAIAMFLVIFPMFTFPKKLPPRHKKKKKKKFSVDAV

SEQ ID NO: 41219 - protein, 49 aa, Artificial Sequence
  Quasi-synthetic sequence derived from human genome
RWTHLLRLLRLIILLRIFHLFHQKRQLEKLIRRRVSENKRRYTRDGFDL

SEQ ID NO: 41220 - protein, 49 aa, Artificial Sequence
  Quasi-synthetic sequence derived from human genome
RVIRLVRVFRIFKLSRHSKGLQILGQTLRASMRELGLLIFFLFIGVVLF

SEQ ID NO: 41221 - protein, 49 aa, Artificial Sequence
  Quasi-synthetic sequence derived from human genome
RVLVGVGVPVVFIIILVLCLRLLQSRCPRVLPKKLQNWNFLPLWMRSLK

SEQ ID NO: 41222 - protein, 49 aa, Artificial Sequence
  Quasi-synthetic sequence derived from human genome
CRGYLARKAFAKRQQQLTAMKVIQRNCAAYLKLRNWQWWRLFTKVKPLL

SEQ ID NO: 41223 - protein, 49 aa, Artificial Sequence
  Quasi-synthetic sequence derived from human genome
KLPWTQVGFSLLFLYLGSGGWRFIRVFIKTIRRDIFGGLVLLKVKAKVR

SEQ ID NO: 41224 - protein, 49 aa, Artificial Sequence
  Quasi-synthetic sequence derived from human genome
KVFLSSLKFHIRRFIFLFFILVIGIYPSGHSLILILGNPKLKQNAKKFL

SEQ ID NO: 41225 - protein, 49 aa, Artificial Sequence
  Quasi-synthetic sequence derived from human genome
ARRGRRRTRAAGSLLSRAAILLFISAFLVRVPSSVGHLVRLPRAFRLTK

SEQ ID NO: 41226 - protein, 49 aa, Artificial Sequence
  Quasi-synthetic sequence derived from human genome
RVDLFYLRGDRGQILVICLIAVMVVFIILVIGVCTCCHPLRKRRKRKKK

SEQ ID NO: 41227 - protein, 49 aa, Artificial Sequence
  Quasi-synthetic sequence derived from human genome
LLDFQRALALFVLTCVVLTFLGHRLLKRLLGPKLRRFLKPQGHPRLLLW

SEQ ID NO: 41228 - protein, 49 aa, Artificial Sequence
  Quasi-synthetic sequence derived from human genome
LNKRYNRKRFFALPYVDHFLRLEREKRARIKARKENLERKKAKILLKKF

SEQ ID NO: 41229 - protein, 49 aa, Artificial Sequence
  Quasi-synthetic sequence derived from human genome
KILRVLRVLRPLRAINRAKGLKHVVQCVFVAIRTIGNIMIVTTLLQFMF

SEQ ID NO: 41230 - protein, 49 aa, Artificial Sequence
  Quasi-synthetic sequence derived from human genome
LTFTLFKCLLLTGGCTLLHCFVILPVFLTFFPPSKKHHKKKKRAKRKER

SEQ ID NO: 41231 - protein, 49 aa, Artificial Sequence
  Quasi-synthetic sequence derived from human genome
RMPKGMWICQVCRPKKKGRKLLHEKAAQIKRRYAKPIGRPKNKLKQRLL

SEQ ID NO: 41232 - protein, 49 aa, Artificial Sequence
  Quasi-synthetic sequence derived from human genome
WRRRHWAVKMVTCFIIGLLFPVFSVCYLIAPKSPLGLFIRKPFIKFICH

SEQ ID NO: 41233 - protein, 49 aa, Artificial Sequence
  Quasi-synthetic sequence derived from human genome
KILRVLRVLRPLRAINRAKGLKHVVQCVFVAIRTIGNIVIVTTLLQFMF

SEQ ID NO: 41234 - protein, 49 aa, Artificial Sequence
  Quasi-synthetic sequence derived from human genome
SRRMIDYRHFVPQMPFVPAVAKSIPRKRISLKRPKKCFRNLFHIRRNKT

SEQ ID NO: 41235 - protein, 49 aa, Artificial Sequence
  Quasi-synthetic sequence derived from human genome
VMKKLVPVRRRAWGQLCLPPQRLRVTRHPLIPAPVLGLLLLLLLSVLLL

SEQ ID NO: 41236 - protein, 49 aa, Artificial Sequence
  Quasi-synthetic sequence derived from human genome
KATGRKAPLWLRAKFQRLLFKLGCYIQKNCGKFLVVGLLIFGAFAVGLK

SEQ ID NO: 41237 - protein, 49 aa, Artificial Sequence
  Quasi-synthetic sequence derived from human genome
KLLKRLRLLPALLILRAFKPHRKIRDYRVVVVGTAGVGKSTLLHKWASG

SEQ ID NO: 41238 - protein, 49 aa, Artificial Sequence
  Quasi-synthetic sequence derived from human genome
MSSHKTFRIKRFLAKKQKQNRPIPQWIRMKTGNKIRYNSKRRHWRRTKL

SEQ ID NO: 41239 - protein, 49 aa, Artificial Sequence
  Quasi-synthetic sequence derived from human genome
AVVVTAVLILLVVRRLRVPKTPAPDGPRYRFRKRDKVLFYGRKIMRKVS

SEQ ID NO: 41240 - protein, 49 aa, Artificial Sequence
  Quasi-synthetic sequence derived from human genome
WVRRKAGYKKKLWKKTPARKKRLREFVFCNKTQSKLLDKMTTSFWKRRN

SEQ ID NO: 41241 - protein, 49 aa, Artificial Sequence
  Quasi-synthetic sequence derived from human genome
KFMNELHKIPLPPWALIAIAIVAVLLVLTCCFCICKKCLFKKKNKKKGK

SEQ ID NO: 41242 - protein, 49 aa, Artificial Sequence
  Quasi-synthetic sequence derived from human genome
WYYSLSQIKFSPVAKKLFVVTAVSAISVIFLAHHFKRKRGKKKGKILPW

SEQ ID NO: 41243 - protein, 49 aa, Artificial Sequence
  Quasi-synthetic sequence derived from human genome
WRGVLVRRTLLVAALRAWMIQCWWRTLVQRRIRQRRQALLRVYVIQEQA

SEQ ID NO: 41244 - protein, 49 aa, Artificial Sequence
  Quasi-synthetic sequence derived from human genome
SRGMLPVAVLVALLAVIVLVALLLLWRRRQKRRTGALVLSRGGKRNGVV

SEQ ID NO: 41245 - protein, 49 aa, Artificial Sequence
  Quasi-synthetic sequence derived from human genome
AKGKRCIVLVTELMTSGTLKTYLKRFKVMKPKVLRSWCRQILKGLLFLH

SEQ ID NO: 41246 - protein, 49 aa, Artificial Sequence
  Quasi-synthetic sequence derived from human genome
LKRLLGPKLRRFLKPQGHPRLLLWFKRGLALAAFLGLVLWLSLDTSQRP

SEQ ID NO: 41247 - protein, 49 aa, Artificial Sequence
  Quasi-synthetic sequence derived from human genome
LRTFRLLRVLKLVRFMPALRRQLVVLMKTMDNVATFCMLLMLFIFIFSI

SEQ ID NO: 41248 - protein, 49 aa, Artificial Sequence
  Quasi-synthetic sequence derived from human genome
VKGKKCIVLVTELMTSGTLKTYLKRFKVMKIKVLRSWCRQILKGLQFLH

SEQ ID NO: 41249 - protein, 49 aa, Artificial Sequence
  Quasi-synthetic sequence derived from human genome
LLQGLFIVLILVGYISVKVMLKSIKTRLGRRVPAAPPALRRNLLLQAWK

SEQ ID NO: 41250 - protein, 49 aa, Artificial Sequence
  Quasi-synthetic sequence derived from human genome
AKQKMRQAWKSWLIYVVVRRTKLQMQTTALEFRQRIILRVWWSTWRQRL

SEQ ID NO: 41251 - protein, 49 aa, Artificial Sequence
  Quasi-synthetic sequence derived from human genome
RWSFRAYTSVLYFNPWMRIFIQAKRVKTKHLCYCLYRPRKYLYVTSSFK

SEQ ID NO: 41252 - protein, 49 aa, Artificial Sequence
  Quasi-synthetic sequence derived from human genome
LRLLRALRVLYVMRLARHSLGLRSLGLTMRRCAREFGLLLLFLCVAMAL

SEQ ID NO: 41253 - protein, 49 aa, Artificial Sequence
  Quasi-synthetic sequence derived from human genome
RSRIPLVRNRRFQLCRCMNPRARKNRSQIALFQKLRFQFFCSMSGRAWV

SEQ ID NO: 41254 - protein, 49 aa, Artificial Sequence
  Quasi-synthetic sequence derived from human genome
IISFFLALTSTALLFLLFFLTLRFSVVKRGRKKLLYIFKQPFMRPVQTT

SEQ ID NO: 41255 - protein, 49 aa, Artificial Sequence
  Quasi-synthetic sequence derived from human genome
KPIVHSRKKYRFHKTRSRMTHRTPKVKKSPKVRKKSYLSRLMLSNRLPF

SEQ ID NO: 41256 - protein, 49 aa, Artificial Sequence
  Quasi-synthetic sequence derived from human genome
RIRISRVCHRWKRLVDDRWLWRHVDLTLYTMRPKVMWHLLRRYMASRLH

SEQ ID NO: 41257 - protein, 49 aa, Artificial Sequence
  Quasi-synthetic sequence derived from human genome
RLRFGPRRALAALVRRGWRCGYLECSAKYNWHVLRLFRELLRCALVRAR

SEQ ID NO: 41258 - protein, 49 aa, Artificial Sequence
  Quasi-synthetic sequence derived from human genome
VALVTLLIWVPVKVILHKKRYIYRKIKGWRPVLMMCVVLTTLPCLTFSI

SEQ ID NO: 41259 - protein, 49 aa, Artificial Sequence
  Quasi-synthetic sequence derived from human genome
GVPALLQISKLKEVTLFVKRLRRKTYLSNMAKTMRMVLKSKRRVSVLKS

SEQ ID NO: 41260 - protein, 49 aa, Artificial Sequence
  Quasi-synthetic sequence derived from human genome
LRRIRAAVVLQKHYRMQRARQAYQRVRRAAVVIQAFTRAMFVRRTYRQV

SEQ ID NO: 41261 - protein, 49 aa, Artificial Sequence
  Quasi-synthetic sequence derived from human genome
RNVVFGVRTSVSVIIALRRAVKRHRERRERQKRVFRMSLLIISTFLLCW

SEQ ID NO: 41262 - protein, 49 aa, Artificial Sequence
  Quasi-synthetic sequence derived from human genome
KPIVHARKKYRFHKTRSHVTHRTPKVKKSPKVRKKSYLSRLMLANRLPF

SEQ ID NO: 41263 - protein, 49 aa, Artificial Sequence
  Quasi-synthetic sequence derived from human genome
THRPLLLQKLLKDGGVLSPILTRLMNFFVFSRGLLQYINQRKKFRRRWV

SEQ ID NO: 41264 - protein, 49 aa, Artificial Sequence
  Quasi-synthetic sequence derived from human genome
KINRPRTELKKKLFKRRRVLNRERRLRHRVVGAVIDQGLITRHHLKKRA

SEQ ID NO: 41265 - protein, 49 aa, Artificial Sequence
  Quasi-synthetic sequence derived from human genome
QFQARCRAYLVRKAFRHRLWAVLTVQAYARGMIARRLHQRLRAEYLWRL

SEQ ID NO: 41266 - protein, 49 aa, Artificial Sequence
  Quasi-synthetic sequence derived from human genome
LVWKRRILFFVVTLVSVFLVWKFTYAHKYLLADNRHYTFYVWKRVFQRY

SEQ ID NO: 41267 - protein, 49 aa, Artificial Sequence
  Quasi-synthetic sequence derived from human genome
KWWRSFLGRKQYQLTVQVAYYTMMMNLYNAMAVRIQRRWRGYRVRKYLF

SEQ ID NO: 41268 - protein, 49 aa, Artificial Sequence
  Quasi-synthetic sequence derived from human genome
AHKVFATTSIKSFFRQLNLYGFRKRRQCTFRTFTRIFSAKRLVSILNKL

SEQ ID NO: 41269 - protein, 49 aa, Artificial Sequence
  Quasi-synthetic sequence derived from human genome
ARLRPRLHFCLVLLLLLVVPAAWGCGPGRVVGSRRRPPRKLVPLAYKQF

SEQ ID NO: 41270 - protein, 49 aa, Artificial Sequence
  Quasi-synthetic sequence derived from human genome
VMRRHCRTLRQRSRRPKMRPARRRGGRRQLLLRALDAVATCWEKLFALR

SEQ ID NO: 41271 - protein, 49 aa, Artificial Sequence
  Quasi-synthetic sequence derived from human genome
IKALVKPKEVKPKIPKGVSRKLDRLAYIAHPKLGKRARARIAKGLRLCR

SEQ ID NO: 41272 - protein, 49 aa, Artificial Sequence
  Quasi-synthetic sequence derived from human genome
KICWGLGIEYTFPPLYYRRAHRRFVTKKALCIRVFQETQKLKKRRRALK

SEQ ID NO: 41273 - protein, 49 aa, Artificial Sequence
  Quasi-synthetic sequence derived from human genome
KFLNLNLRYSFLKTASFFVRLGPMALAFKVRGLLDCKHSWKRLKDIRKI

SEQ ID NO: 41274 - protein, 49 aa, Artificial Sequence
  Quasi-synthetic sequence derived from human genome
RAGVTLRVLRMMRIFWVIKLARHFIGLQTLGLTLKRCYREMVMLLVFIC

SEQ ID NO: 41275 - protein, 49 aa, Artificial Sequence
  Quasi-synthetic sequence derived from human genome
LRARVSYRLLGVISLLHLVLSMGLQLYGFRQRQRARKEWRLHRGLSHRR

SEQ ID NO: 41276 - protein, 49 aa, Artificial Sequence
  Quasi-synthetic sequence derived from human genome
ARRKHAVAVIWAYWLGLKVRREYRKFFRANAGKKIYEFTLQRIVQKYFL

SEQ ID NO: 41277 - protein, 49 aa, Artificial Sequence
  Quasi-synthetic sequence derived from human genome
RLPERRYIENIYHSKPMRWPFFLFIPFFIIFCVLIAIMVKVNFQRKKWR

SEQ ID NO: 41278 - protein, 49 aa, Artificial Sequence
  Quasi-synthetic sequence derived from human genome
DRYFALVQPFRLTRWRTRYKTIRINLGLWAASFILALPVWVYSKVIKFK

SEQ ID NO: 41279 - protein, 49 aa, Artificial Sequence
  Quasi-synthetic sequence derived from human genome
WRRKHWVVKLLTCMTIGFLFPMLSIAYLISPRSNLGLFIKKPFIKFICH

SEQ ID NO: 41280 - protein, 49 aa, Artificial Sequence
  Quasi-synthetic sequence derived from human genome
VLGKSCKPIPVMLLGVTLLKKKYPLAKYLCVLLIVAGVALFMYKPKKVV

SEQ ID NO: 41281 - protein, 49 aa, Artificial Sequence
  Quasi-synthetic sequence derived from human genome
RRKEILAKYPAIKALMRPDPRLKWAVLVLVLVQMLACWLVRGLAWRWLL

SEQ ID NO: 41282 - protein, 49 aa, Artificial Sequence
  Quasi-synthetic sequence derived from human genome
FWIVFLLLIVFYTAITKKIFKSHLKSSRNSTSVKKKSSRNIFSIVFVFF

SEQ ID NO: 41283 - protein, 49 aa, Artificial Sequence
  Quasi-synthetic sequence derived from human genome
WIIQCWWRMTLSRVLEKKRQAALIAYATRERAVIKLQSLVRMWRVRWRY

SEQ ID NO: 41284 - protein, 49 aa, Artificial Sequence
  Quasi-synthetic sequence derived from human genome
RTFRLLRVLKLVRFLPALRRQLVVLVKTMDNVATFCTLLMLFIFIFSIL

SEQ ID NO: 41285 - protein, 49 aa, Artificial Sequence
  Quasi-synthetic sequence derived from human genome
LRRKLYIHRVTLRKLLPGVQYVYRCGSAQGWSRRFRFRALKNGAHWSPR

SEQ ID NO: 41286 - protein, 49 aa, Artificial Sequence
  Quasi-synthetic sequence derived from human genome
FSPPGGPVPLSVLILSLLVLFFSAVFVAAGLFAYVLRRRRKKLPFRSKR

SEQ ID NO: 41287 - protein, 49 aa, Artificial Sequence
  Quasi-synthetic sequence derived from human genome
KLDLKAKKAQLMQYLSLPKTPKMLKMSKGLDARSKRWLKIIWRRHGIWP

SEQ ID NO: 41288 - protein, 49 aa, Artificial Sequence
  Quasi-synthetic sequence derived from human genome
LHQEVLRRIILLQRWFRVLLCRQHFLHLRQASVIIQRFWRNYLNQKQVR

SEQ ID NO: 41289 - protein, 49 aa, Artificial Sequence
  Quasi-synthetic sequence derived from human genome
MVVVMKFFRWVRRAWQRIISWVFFWRQKIKPTISGHPDSKKHSLKKMEK

SEQ ID NO: 41290 - protein, 49 aa, Artificial Sequence
  Quasi-synthetic sequence derived from human genome
RLRHPRTRWKNWWVRGILTLAMIAFFFIIIYLGPMVLMIIVMCVQIKCF

SEQ ID NO: 41291 - protein, 49 aa, Artificial Sequence
  Quasi-synthetic sequence derived from human genome
RRNKRIWASGVVLLETVLFGFLLLYFPVFILYFKPSVFRCIALRWVRLL

SEQ ID NO: 41292 - protein, 49 aa, Artificial Sequence
  Quasi-synthetic sequence derived from human genome
RKFKFRKMHYDRFVIFLMPHIGCIVMALSKYLMMFQIYCKVCIPALKKN

SEQ ID NO: 41293 - protein, 49 aa, Artificial Sequence
  Quasi-synthetic sequence derived from human genome
PAAFAGKLLSVFRQPLSSLWRSLVPLFCWLRATFWLLATKRRKQQLVLR

SEQ ID NO: 41294 - protein, 49 aa, Artificial Sequence
  Quasi-synthetic sequence derived from human genome
YPLRRAIVFTRQLVTYIVVGVTLRPAILVIPCLLLIKCHLKLYRTKLIY

SEQ ID NO: 41295 - protein, 49 aa, Artificial Sequence
  Quasi-synthetic sequence derived from human genome
LRTSFQQFSSLTNLPLRKLKFSPIKYGYQPRRNFWPARLATRLLKLRYL

SEQ ID NO: 41296 - protein, 49 aa, Artificial Sequence
  Quasi-synthetic sequence derived from human genome
ILLPLHRPSWATWLDFLILKVAVGTRLHRVPVKIKRMCVNGLCRARKHR

SEQ ID NO: 41297 - protein, 49 aa, Artificial Sequence
  Quasi-synthetic sequence derived from human genome
RKRKARTVLKSTSKLMTQMRMGKKKRAMKGKKPSFMVIRFPGRRGYGRL

SEQ ID NO: 41298 - protein, 49 aa, Artificial Sequence
  Quasi-synthetic sequence derived from human genome
LKKNKIHSLPDKVFIKYTKLKKIFLQHNCIRHISRKAFFGLCNLQILYL

SEQ ID NO: 41299 - protein, 49 aa, Artificial Sequence
  Quasi-synthetic sequence derived from human genome
FLKLKNAATLIQRHWRGHNCRKNYGLMRLGFLRLQALHRSRKLHQQYRL

SEQ ID NO: 41300 - protein, 49 aa, Artificial Sequence
  Quasi-synthetic sequence derived from human genome
LLYLNRAACHLKLKNLHKAIEDSSKAYRIMKRHLRLIHPTKLYKLMLRR

SEQ ID NO: 41301 - protein, 49 aa, Artificial Sequence
  Quasi-synthetic sequence derived from human genome
KPIVHARKKYRFHKTRSHVTHRTTKVKKSPKVRKKSYLSRLMLANRLPF

SEQ ID NO: 41302 - protein, 49 aa, Artificial Sequence
  Quasi-synthetic sequence derived from human genome
RLFSKVLVTIKKVYMKERSFKGVEFGKNLGLKSSLIRKPRIVSRGRRPR

SEQ ID NO: 41303 - protein, 49 aa, Artificial Sequence
  Quasi-synthetic sequence derived from human genome
LRAAKWLHFPQLALRRRLGQLSCMSRPALKLRSWPLTVLYYLLPFGALR

SEQ ID NO: 41304 - protein, 49 aa, Artificial Sequence
  Quasi-synthetic sequence derived from human genome
NFYRNKLKYLAFLRKRMNTNPSRGPYHFRAPSRIFWRTVRGMLPHKTKR

SEQ ID NO: 41305 - protein, 49 aa, Artificial Sequence
  Quasi-synthetic sequence derived from human genome
RQRLPSVENRPKIAAFLPARQLWKWFGKPTQRRGMKGKARKLFYKAIVR

SEQ ID NO: 41306 - protein, 49 aa, Artificial Sequence
  Quasi-synthetic sequence derived from human genome
LMRRILTRNEKNRPRRRFLCHLSRQQLRMAMRIPVLYEQLKREKLRVHK

SEQ ID NO: 41307 - protein, 49 aa, Artificial Sequence
  Quasi-synthetic sequence derived from human genome
KYLKVFYKFLNSNRPKIRHTEKKSFKCKKRVKLFCMLSHKTQHKSIYHR

SEQ ID NO: 41308 - protein, 49 aa, Artificial Sequence
  Quasi-synthetic sequence derived from human genome
LVICLCYLLIVVKVRSAGRRVWAPSCQRRRRSERRVTRMVVAVVALFVL

SEQ ID NO: 41309 - protein, 49 aa, Artificial Sequence
  Quasi-synthetic sequence derived from human genome
PFLNPFKKIKDHLLLIKKVTWTMNGLMLPTDIKRRKTKPVLSIRMKKLT

SEQ ID NO: 41310 - protein, 49 aa, Artificial Sequence
  Quasi-synthetic sequence derived from human genome
TSEFKGAALVSPISKRWTHLVRLLRLIILIRIFHLLHQKRQLEKLMRRL

SEQ ID NO: 41311 - protein, 49 aa, Artificial Sequence
  Quasi-synthetic sequence derived from human genome
LVLVLLVSPRGCRARRGLRGLLMAHSQRLLFRIGYSLYTRTWLGYLFYR

SEQ ID NO: 41312 - protein, 49 aa, Artificial Sequence
  Quasi-synthetic sequence derived from human genome
GKAAINLAKLKLFRHYYVLIVCYIYFTRIIAFLLKLAVPFQWKWLYQLL

SEQ ID NO: 41313 - protein, 49 aa, Artificial Sequence
  Quasi-synthetic sequence derived from human genome
IIHILQIRKLRHRLSNFPRLPGILAPETVLLPFCYKVFRKKEKVKRSQK

SEQ ID NO: 41314 - protein, 49 aa, Artificial Sequence
  Quasi-synthetic sequence derived from human genome
ILLQKVIRGFKDRSNFLKLKNAATLIQRHWRGHNCRKNYGLMRLGFLRL

SEQ ID NO: 41315 - protein, 49 aa, Artificial Sequence
  Quasi-synthetic sequence derived from human genome
RRRGFGLFFFLRLHRLLLLFLVLRGTLANKLNVPQVLLPFGREPGRVPF

SEQ ID NO: 41316 - protein, 49 aa, Artificial Sequence
  Quasi-synthetic sequence derived from human genome
MKATGKLYACKKLNKKRLKKRKGYQGAMVEKKILMKVHSRFIVSLAYAF

SEQ ID NO: 41317 - protein, 49 aa, Artificial Sequence
  Quasi-synthetic sequence derived from human genome
SLRIARFRFRAFHFLNRFPSVYLRCKMVVCRAYDPSSRCYRGCVLRSKR

SEQ ID NO: 41318 - protein, 49 aa, Artificial Sequence
  Quasi-synthetic sequence derived from human genome
MGFWWILRFPVFLAILINFFIFVRIVQLLVAKLRARQMHHTDYKFRLAK

SEQ ID NO: 41319 - protein, 49 aa, Artificial Sequence
  Quasi-synthetic sequence derived from human genome
CIIQCWWRLILSKILKKRRQAALEAFSRKEWAAVTLQSQARMWRIRRRY

SEQ ID NO: 41320 - protein, 49 aa, Artificial Sequence
  Quasi-synthetic sequence derived from human genome
LRLQIIQRERRRKELFRKKNKAAAVIQRAWRSYQLRKHLSHLRHMKQLG

SEQ ID NO: 41321 - protein, 49 aa, Artificial Sequence
  Quasi-synthetic sequence derived from human genome
FRVAKKRAPKVLGTTLVVGLLAGVGYFAFMLFRKRLGSMILAFRPRPNY

SEQ ID NO: 41322 - protein, 49 aa, Artificial Sequence
  Quasi-synthetic sequence derived from human genome
RALLVVVNALLRKRRYHAALAVLKGFRNGAVYGAKIRAPHALVMTFLFR

SEQ ID NO: 41323 - protein, 49 aa, Artificial Sequence
  Quasi-synthetic sequence derived from human genome
VRICSKLKAVLQKQGIWSEIHFILTNPRSLKHLCRLKIRKCMGRLHLRC

SEQ ID NO: 41324 - protein, 49 aa, Artificial Sequence
  Quasi-synthetic sequence derived from human genome
RRIVVSRGRLRRLLWIGFTLTAVALILWQCALLVFSFYTVSVSIKVHFR

SEQ ID NO: 41325 - protein, 49 aa, Artificial Sequence
  Quasi-synthetic sequence derived from human genome
LIAFDRFLKIIRPLRNIFLKKPVFAKTVSIFIWFFLFFISLPNTILSNK

SEQ ID NO: 41326 - protein, 49 aa, Artificial Sequence
  Quasi-synthetic sequence derived from human genome
VLGFLRVVRFVRILRIFKLTRHFVGLRVLGHTLRASTNEFLLLIIFLAL

SEQ ID NO: 41327 - protein, 49 aa, Artificial Sequence
  Quasi-synthetic sequence derived from human genome
AWNKWIDIKQFVWYTPPTFMIAVFLPIVVLIFKSILFLPCLRKKILKIR

SEQ ID NO: 41328 - protein, 49 aa, Artificial Sequence
  Quasi-synthetic sequence derived from human genome
RNLVLKNRSLKLQKMKYRPPKTKFFFTVIPQPIFLSPGITLTLPIVFRP

SEQ ID NO: 41329 - protein, 49 aa, Artificial Sequence
  Quasi-synthetic sequence derived from human genome
QRRALLRAVFVLRQGLACLQRLHVAWFYIHGVFYHLAKRLTGITYLRVR

SEQ ID NO: 41330 - protein, 49 aa, Artificial Sequence
  Quasi-synthetic sequence derived from human genome
VFVFHRLKIKQILPTIYKRKNLSLFLSISLLIFWGSSLLGARLYWMGNK

SEQ ID NO: 41331 - protein, 49 aa, Artificial Sequence
  Quasi-synthetic sequence derived from human genome
VLVLLVSLGVAIHLCCRRRRARLRFMKQKFNIVCLKISGFTTCCCFQIL

SEQ ID NO: 41332 - protein, 49 aa, Artificial Sequence
  Quasi-synthetic sequence derived from human genome
RGQLMRIEFKKIVERRDALLVIQWNIRAFMGVKNWPWMKLYFKIKPLLK

SEQ ID NO: 41333 - protein, 49 aa, Artificial Sequence
  Quasi-synthetic sequence derived from human genome
RDPLRIPREHVHNASAHLTFNKFWRRYGKLSRHLMKVKLKKYTKFLFVR

SEQ ID NO: 41334 - protein, 49 aa, Artificial Sequence
  Quasi-synthetic sequence derived from human genome
RVVRFVRILRIFKLTRHFVGLRVLGHTLRASTNEFLLLIIFLALGVLIF

SEQ ID NO: 41335 - protein, 49 aa, Artificial Sequence
  Quasi-synthetic sequence derived from human genome
ILGLFLLALLGLVVKRAVERRKALSRRARRLAVRMRALESSQRPRGSPR

SEQ ID NO: 41336 - protein, 49 aa, Artificial Sequence
  Quasi-synthetic sequence derived from human genome
REGQGFHILIPTILGLFLLALLGLVVKRAVERRKALSRRARRLAVRMRA

SEQ ID NO: 41337 - protein, 49 aa, Artificial Sequence
  Quasi-synthetic sequence derived from human genome
LRHVPLRKVHLFTIIQMSCLGLLWIIKVSRAAIVFPMMVLALVFVRKLM

SEQ ID NO: 41338 - protein, 49 aa, Artificial Sequence
  Quasi-synthetic sequence derived from human genome
KLIRMGPQERWLLRTKRLHWSRLLFLLGMLIIGSTYQHLRRPRGLSSLW

SEQ ID NO: 41339 - protein, 49 aa, Artificial Sequence
  Quasi-synthetic sequence derived from human genome
RKAIQRRKWAVRIIRKFIKGFISRNKPLCPDNEEFIVFVRKNYILNLRY

SEQ ID NO: 41340 - protein, 49 aa, Artificial Sequence
  Quasi-synthetic sequence derived from human genome
RKAAIVIQVRCRAYYQGKMQREKYLTILKAVKVLQASFRGVRVRRTLRK

SEQ ID NO: 41341 - protein, 49 aa, Artificial Sequence
  Quasi-synthetic sequence derived from human genome
KTCSQRRRRAMRAFRMLLYSKSTSLTFHWKLWGRHRGRRRGLAHPKNHL

SEQ ID NO: 41342 - protein, 49 aa, Artificial Sequence
  Quasi-synthetic sequence derived from human genome
IIIQRKWRAILPAKIAHEHFLMIKRHRAACLIQAHYRGYKGRQVFLRQK

SEQ ID NO: 41343 - protein, 49 aa, Artificial Sequence
  Quasi-synthetic sequence derived from human genome
GFGGFKKFYFHQHLCILKAKLGRPVTWNRQLRHFQGRKKALQIQKTWIK

SEQ ID NO: 41344 - protein, 49 aa, Artificial Sequence
  Quasi-synthetic sequence derived from human genome
RCILLRWARLLGFATVYGTVTLKLHRVLKVFLSRTAQRIPYMTGGRVMR

SEQ ID NO: 41345 - protein, 49 aa, Artificial Sequence
  Quasi-synthetic sequence derived from human genome
LSIQKVLRGYRYRKEFLRQRRAAVTLQAWWRGYCNRRNFKLILVGFERL

SEQ ID NO: 41346 - protein, 49 aa, Artificial Sequence
  Quasi-synthetic sequence derived from human genome
LKLRSWPLTVLYYLLPFGALRPLSRVGWRPVSRVALYKSVPTRLLSRAW

SEQ ID NO: 41347 - protein, 49 aa, Artificial Sequence
  Quasi-synthetic sequence derived from human genome
KHFLRMLIQVCLYFYCKFLWRCLKFVMRKLTGRCELQRICYNTKPGASR

SEQ ID NO: 41348 - protein, 49 aa, Artificial Sequence
  Quasi-synthetic sequence derived from human genome
GARKFVFFNIPQIQYKNPWVQIMMFKNMTPSPFLRFYLGKPSGKRRRRK

SEQ ID NO: 41349 - protein, 49 aa, Artificial Sequence
  Quasi-synthetic sequence derived from human genome
WVYLLLRKILLRKFCQMRKRRLREQAPLLPTPTVIDPSRFCAQPFRWFL

SEQ ID NO: 41350 - protein, 49 aa, Artificial Sequence
  Quasi-synthetic sequence derived from human genome
KRRMSVGQQTWALLCKNCLKKWRMKRQTLLEWLFSFLLVLFLYLFFSNL

SEQ ID NO: 41351 - protein, 49 aa, Artificial Sequence
  Quasi-synthetic sequence derived from human genome
RGFLMRVEYQKMLQRREALFCIQYNVRAFMNVKHWPWMKLFFKIKPLLK

SEQ ID NO: 41352 - protein, 49 aa, Artificial Sequence
  Quasi-synthetic sequence derived from human genome
ARGYLARRAFQKRQQQQSALRVMQRNCAAYLKLRHWQWWRLFTKVKPLL

SEQ ID NO: 41353 - protein, 49 aa, Artificial Sequence
  Quasi-synthetic sequence derived from human genome
KICVFIFAFVIPVLIIIVCYTLMILRLKSVRLLSGSREKDRNLRRITRL

SEQ ID NO: 41354 - protein, 49 aa, Artificial Sequence
  Quasi-synthetic sequence derived from human genome
SRRSRTPSRRRRSRSVVRRRSFSISPVRLRRSRTPLRRRFSRSPIRRKR

SEQ ID NO: 41355 - protein, 49 aa, Artificial Sequence
  Quasi-synthetic sequence derived from human genome
RVIHDGARLFRIKCVTRIQAYWRGCVVRKWYRNLRKTVPPTDAKLRKKF

SEQ ID NO: 41356 - protein, 49 aa, Artificial Sequence
  Quasi-synthetic sequence derived from human genome
TKYKKFPHWLDKWMLTRKQFGLLSLFFAVLHAIYTLSYAMRRSYRYKLL

SEQ ID NO: 41357 - protein, 49 aa, Artificial Sequence
  Quasi-synthetic sequence derived from human genome
RRPSPYWRLTWRVVSPLLLTIFVAYIILLFWKPLRYKAWNPKYELFPSR

SEQ ID NO: 41358 - protein, 49 aa, Artificial Sequence
  Quasi-synthetic sequence derived from human genome
RRAKRKVTRMILIVAALFCLCWMPHHALILCVWFGQFPLTRATYALRIL

SEQ ID NO: 41359 - protein, 49 aa, Artificial Sequence
  Quasi-synthetic sequence derived from human genome
DAFNVPVFWPILVMYFIMLFCITMKRQIKHMIKYRYIPFTHGKRRYRGK

SEQ ID NO: 41360 - protein, 49 aa, Artificial Sequence
  Quasi-synthetic sequence derived from human genome
KCKKKQKSTKKFWIQKLPKVLCLHLKRFHWTAYLRNKVDTYVEFPLRGL

SEQ ID NO: 41361 - protein, 49 aa, Artificial Sequence
  Quasi-synthetic sequence derived from human genome
IAWLLYCHKTRLKKILKESRQRHLENFRIRAKHLAANWNRIRTSRRTII

SEQ ID NO: 41362 - protein, 49 aa, Artificial Sequence
  Quasi-synthetic sequence derived from human genome
TKYKKFPHWLDKWMLTRKQFGLLSFFFAVLHAIYSLSYPMRRSYRYKLL

SEQ ID NO: 41363 - protein, 49 aa, Artificial Sequence
  Quasi-synthetic sequence derived from human genome
ILGLVLPLLVMVICYSGILKTLLRCRNEKKRHRAVRLIFTIMIVYFLFW

SEQ ID NO: 41364 - protein, 49 aa, Artificial Sequence
  Quasi-synthetic sequence derived from human genome
FAVIGIASGFGGALFVYLNRKIVQVMRKQKTINRFLMRKRLLFPALVTL

SEQ ID NO: 41365 - protein, 49 aa, Artificial Sequence
  Quasi-synthetic sequence derived from human genome
IQISKDGLPGRVPLWVILLSAFAGLLLLMLLILALWKIGFFKRPLKKKM

SEQ ID NO: 41366 - protein, 49 aa, Artificial Sequence
  Quasi-synthetic sequence derived from human genome
KNNRQKVSGILQRVLLLFRAAQCSFPVAQWYILQLRWARKVMQKIRMKG

SEQ ID NO: 41367 - protein, 49 aa, Artificial Sequence
  Quasi-synthetic sequence derived from human genome
KVGQVLRVMRLMRIFRILKLARHSTGLRAFGFTLRQCYQQVGCLLLFIA

SEQ ID NO: 41368 - protein, 49 aa, Artificial Sequence
  Quasi-synthetic sequence derived from human genome
TLHREVVRKILLLQSWFRMVLERRHFLQMKRAAVTIQACWRSYRVRRAL

SEQ ID NO: 41369 - protein, 49 aa, Artificial Sequence
  Quasi-synthetic sequence derived from human genome
RYFSITRPLTYRAKRTPKRAGIMIGLAWLISFILWAPAILCWQYLVGKR

SEQ ID NO: 41370 - protein, 49 aa, Artificial Sequence
  Quasi-synthetic sequence derived from human genome
HCPICLRPPRPGLRRQWKCVQRRCLRHLAHRLRRRHQRCQRRTPLAVAP

SEQ ID NO: 41371 - protein, 49 aa, Artificial Sequence
  Quasi-synthetic sequence derived from human genome
KLKKITKTVQQRYWAMKERNIQFQRYNKLRHSVIYIQAIFRGKKARRHL

SEQ ID NO: 41372 - protein, 49 aa, Artificial Sequence
  Quasi-synthetic sequence derived from human genome
WPFQRALCLLCFYLKYLNMYASICFLTCISLQRCFFLLKPFRARDWKRR

SEQ ID NO: 41373 - protein, 49 aa, Artificial Sequence
  Quasi-synthetic sequence derived from human genome
LITKELYRSYVRTRGVGKVPRKKVNVKVFIIIAVFFICFVPFHFARIPY

SEQ ID NO: 41374 - protein, 49 aa, Artificial Sequence
  Quasi-synthetic sequence derived from human genome
KVGLVLRVLRALRILYVMRLARHSLGLQTLGLTVRRCTREFGLLLLFLA

SEQ ID NO: 41375 - protein, 49 aa, Artificial Sequence
  Quasi-synthetic sequence derived from human genome
MVWPALWELYRELGLFQGPALGLRNHLGRKLRRRKKKKAKRTTNWKIIT

SEQ ID NO: 41376 - protein, 49 aa, Artificial Sequence
  Quasi-synthetic sequence derived from human genome
ILGLVLPLLIMVICYSGILKTLLRCRNEKKRHRAVRVIFTIMIVYFLFW

SEQ ID NO: 41377 - protein, 49 aa, Artificial Sequence
  Quasi-synthetic sequence derived from human genome
LLFHQVRKYLLRLDVRKDHVKFWRPQLLLLVGNPRGALPLLRLANQLKK

SEQ ID NO: 41378 - protein, 49 aa, Artificial Sequence
  Quasi-synthetic sequence derived from human genome
KRYILFCLVIFAGVLATIMGLYGAIFRLVQASGQKAPRPAARRKARRLL

SEQ ID NO: 41379 - protein, 49 aa, Artificial Sequence
  Quasi-synthetic sequence derived from human genome
FIFYLLASVLLSLLLILKAGRRWNKYFKSRRPLFTGGLIGGLFTYVLFW

SEQ ID NO: 41380 - protein, 49 aa, Artificial Sequence
  Quasi-synthetic sequence derived from human genome
RGFLMRVEFQKMVQRRESIFCIQYNIRSFMNVKHWPWMKLFFKIKPLLK

SEQ ID NO: 41381 - protein, 49 aa, Artificial Sequence
  Quasi-synthetic sequence derived from human genome
RRKKRYLRHDKPPYTYLAMIALVIQAAPSRRLKLAQIIRQVQAVFPFFR

SEQ ID NO: 41382 - protein, 49 aa, Artificial Sequence
  Quasi-synthetic sequence derived from human genome
RRKAAKRKWAAQTIRRLIRGFVLRHAPRCPENAFFLDHVRTSFLLNLRR

SEQ ID NO: 41383 - protein, 49 aa, Artificial Sequence
  Quasi-synthetic sequence derived from human genome
YYHLLVQIPIFFFTVVVMLITYTKILQALNIRIGTRFSTGQKKKARKKK

SEQ ID NO: 41384 - protein, 49 aa, Artificial Sequence
  Quasi-synthetic sequence derived from human genome
KYLKVFYKFLNSNRHTIRHTGKKCFKCKKCVKSFCIRLHKTQHKCVYIT

SEQ ID NO: 41385 - protein, 49 aa, Artificial Sequence
  Quasi-synthetic sequence derived from human genome
KCVPVTLWHLGYWLCYVNSTVNPICYALCNRTFRKTFKMLLLCRWKKKK

SEQ ID NO: 41386 - protein, 49 aa, Artificial Sequence
  Quasi-synthetic sequence derived from human genome
IIRSLRQGLRVEKRLKTKAVRMIAIVLAIFLVCFVPYHVNRSVYVLHYR

SEQ ID NO: 41387 - protein, 49 aa, Artificial Sequence
  Quasi-synthetic sequence derived from human genome
LALSDLIQKYFVSPTLFRVIRLARIGRVLRLIRGAKGIRTLLFALMMSL

SEQ ID NO: 41388 - protein, 49 aa, Artificial Sequence
  Quasi-synthetic sequence derived from human genome
RGWLQKVKYHRLKGATLTLQRYCRGHLARRLAEHLRRIRAAVVLQKHYR

SEQ ID NO: 41389 - protein, 49 aa, Artificial Sequence
  Quasi-synthetic sequence derived from human genome
RGVLARMEYKKLLERRDSLLVIQWNIRAFMGVKNWPWMKLYFKIKPLLK

SEQ ID NO: 41390 - protein, 49 aa, Artificial Sequence
  Quasi-synthetic sequence derived from human genome
VILQALVRGWLVRKRFLEQRAKIRLLHFTAAAYYHLNAVRIQRAYKLYL

SEQ ID NO: 41391 - protein, 49 aa, Artificial Sequence
  Quasi-synthetic sequence derived from human genome
KYVKVFHKYSNSNRYKIRHTKKKTFKCMKCSKSFFMLSHLIQHKRIHTR

SEQ ID NO: 41392 - protein, 49 aa, Artificial Sequence
  Quasi-synthetic sequence derived from human genome
FIIFGVFLPLSMLITVIIDNFNKHKIKLGGSNIFITVKQRKQYRRLKKL

SEQ ID NO: 41393 - protein, 49 aa, Artificial Sequence
  Quasi-synthetic sequence derived from human genome
WRGYRQRKIYLEWLQYFKANLDAIIKIQAWARMWAARRQYLRRLHYFQK

SEQ ID NO: 41394 - protein, 49 aa, Artificial Sequence
  Quasi-synthetic sequence derived from human genome
LTLLIPYLLGRKRRWSKCKIRVFVGGQINRMDQERKAIISLLSKFRLGF

SEQ ID NO: 41395 - protein, 49 aa, Artificial Sequence
  Quasi-synthetic sequence derived from human genome
VRGMTKLDRTAFKKTVNIPVLKVRKEIVSKLMRSLKRAALQRPGIRRVI

SEQ ID NO: 41396 - protein, 49 aa, Artificial Sequence
  Quasi-synthetic sequence derived from human genome
VHRLRVQQAALRAARLRHQELFRLRGIKAQVALRLAELARRQRRRQARR

SEQ ID NO: 41397 - protein, 49 aa, Artificial Sequence
  Quasi-synthetic sequence derived from human genome
AHKRMKVKKLPMILALHLKRFKYMDQLHRYTKLSYRVVFPLELRLFNTS

SEQ ID NO: 41398 - protein, 49 aa, Artificial Sequence
  Quasi-synthetic sequence derived from human genome
VVSRRNVNQTRLKRVLSGATLPDKLRDKLKLMKQRRKPPGFLALVKLLR

SEQ ID NO: 41399 - protein, 49 aa, Artificial Sequence
  Quasi-synthetic sequence derived from human genome
LLAWPGLALPLVAMAAGGRWVRQQGPRVRRGISRLWLRVLLRLSPMAFR

SEQ ID NO: 41400 - protein, 49 aa, Artificial Sequence
  Quasi-synthetic sequence derived from human genome
RGFLMRVEFRKMMERRESIFCIQYNIRAFMNVKHWPWMKLYFKIKPLLK

SEQ ID NO: 41401 - protein, 49 aa, Artificial Sequence
  Quasi-synthetic sequence derived from human genome
KRDVKVSLFTAFFLATIMGVRFKRSKKIMPAGLVAGLSLMMILRLVLLL

SEQ ID NO: 41402 - protein, 49 aa, Artificial Sequence
  Quasi-synthetic sequence derived from human genome
PLCWGALAAQLALLGLGLLHALLLVLLLCRLRRLRARARARAAARLSLT

SEQ ID NO: 41403 - protein, 49 aa, Artificial Sequence
  Quasi-synthetic sequence derived from human genome
FFFNISGILLWYPVPCTRLPIRMAKALGKRTAKYRWFAVLYLLVCFLLL

SEQ ID NO: 41404 - protein, 49 aa, Artificial Sequence
  Quasi-synthetic sequence derived from human genome
ILSIVGTVLSDIIQKYFFSPTLFRVIRLARIGRILRLIRGAKGIRTLLF

SEQ ID NO: 41405 - protein, 49 aa, Artificial Sequence
  Quasi-synthetic sequence derived from human genome
WLRVRFGTWNWIWRRCCRAASAAVLAPLGFTLRKPPAVGRNRRHHRHPR

SEQ ID NO: 41406 - protein, 49 aa, Artificial Sequence
  Quasi-synthetic sequence derived from human genome
RAGITAAINLAKLKLFRHYYVLIVCYIYFTRIIAFLLKLAVPFQWKWLY

SEQ ID NO: 41407 - protein, 49 aa, Artificial Sequence
  Quasi-synthetic sequence derived from human genome
FVKLRPDNLALIQLTVIMGYLRIIRFLPLFKIIVPILIRIADVQIKKRL

SEQ ID NO: 41408 - protein, 49 aa, Artificial Sequence
  Quasi-synthetic sequence derived from human genome
PFGRTAKPAHIAKVKMKFRFLGKLMAKAIMDFRLVDLPLGLPFYKWMLR

SEQ ID NO: 41409 - protein, 49 aa, Artificial Sequence
  Quasi-synthetic sequence derived from human genome
RYLALVHPLRARALRGRRLALGLCMAAWLMAAALALPLTLQRQTFRLAR

SEQ ID NO: 41410 - protein, 49 aa, Artificial Sequence
  Quasi-synthetic sequence derived from human genome
LKSLKKQMKKVKKMTVKDMVTAFFSSYWSIFMTLLHFVASVFRGFFRII

SEQ ID NO: 41411 - protein, 49 aa, Artificial Sequence
  Quasi-synthetic sequence derived from human genome
MAQILRSHLIKATVIPNRVKMLPYFGIIRNRMMSTHKSKKKIREYYRLL

SEQ ID NO: 41412 - protein, 49 aa, Artificial Sequence
  Quasi-synthetic sequence derived from human genome
WRVFSLFSYVLIYLFSKYLAFNTLFALKRMALQRDRKEKTRAWCIFIKL

SEQ ID NO: 41413 - protein, 49 aa, Artificial Sequence
  Quasi-synthetic sequence derived from human genome
WKHFLTLKMNISVLVLPLFIFTFLYVQMRKTLRFREQRYSLFKLVFAIM

SEQ ID NO: 41414 - protein, 49 aa, Artificial Sequence
  Quasi-synthetic sequence derived from human genome
MGFVRQIQLLLWKNWTLRKRQKIRFVVELVWPLSLFLVLIWLRNANPLY

SEQ ID NO: 41415 - protein, 49 aa, Artificial Sequence
  Quasi-synthetic sequence derived from human genome
KKFKLWLLNALEGVPALLQISKLKEVTLFVKRLRRKTYLSNMAKTMRMV

SEQ ID NO: 41416 - protein, 49 aa, Artificial Sequence
  Quasi-synthetic sequence derived from human genome
LLSPGLLPHLLPALGFKNKTVLKKRCKDCYLVKRRGRWYVYCKTHPRHK

SEQ ID NO: 41417 - protein, 49 aa, Artificial Sequence
  Quasi-synthetic sequence derived from human genome
AQKRMRVKKLPMILALHLKRFKYMEQLHRYTKLSYRVVFPLELRLFNTS

SEQ ID NO: 41418 - protein, 49 aa, Artificial Sequence
  Quasi-synthetic sequence derived from human genome
LPARPWPRWLGVAALGLAAVALGTVAWRRAWPRRRRRLQQVGTVAKLWI

SEQ ID NO: 41419 - protein, 49 aa, Artificial Sequence
  Quasi-synthetic sequence derived from human genome
VPRKLLSHGKKPFSQHVRKLRASITPGTILIILTGRHRGKRVVFLKQLA

SEQ ID NO: 41420 - protein, 49 aa, Artificial Sequence
  Quasi-synthetic sequence derived from human genome
RHPLFIWLKMRISKLVPWMILGSLLYVSMICVFHSKYAGFMVPYFLRKF

SEQ ID NO: 41421 - protein, 49 aa, Artificial Sequence
  Quasi-synthetic sequence derived from human genome
MAVYRRRFVQQKRAAITLQHYFRTWQTRKQFLLYRKAAVVLQNHYRAFL

SEQ ID NO: 41422 - protein, 49 aa, Artificial Sequence
  Quasi-synthetic sequence derived from human genome
RLRMVWRRKRKPAGRQQPNPLPHLWRRTPQTRRKSLAYAHIFSPNLCFI

SEQ ID NO: 41423 - protein, 49 aa, Artificial Sequence
  Quasi-synthetic sequence derived from human genome
LSIFYLLKIVNFSRLIFHHLKRKAKSVVLVIVLGSLFFLVCHLVMKHTY

SEQ ID NO: 41424 - protein, 49 aa, Artificial Sequence
  Quasi-synthetic sequence derived from human genome
RIIWSLRQRQMDRHAKIKRAITFIMVVAIVFVICFLPSVVVRIHIFWLL

SEQ ID NO: 41425 - protein, 49 aa, Artificial Sequence
  Quasi-synthetic sequence derived from human genome
KVGLVLRVLRALRILYVMRLARHSLGLQTLGLTARRCTREFGLLLLFLC

SEQ ID NO: 41426 - protein, 49 aa, Artificial Sequence
  Quasi-synthetic sequence derived from human genome
AKLWSFFIYLLRRQIRTVIQYQTVRYDILPLSPVSRNRLAQVKRKILVL

SEQ ID NO: 41427 - protein, 49 aa, Artificial Sequence
  Quasi-synthetic sequence derived from human genome
RLCLLRFPSRYWLGAYQLQRVVLAFMVPLGVITTSYLLLLAFLQRRQRR

SEQ ID NO: 41428 - protein, 49 aa, Artificial Sequence
  Quasi-synthetic sequence derived from human genome
RWRVLRLGAWARWLLVALTAATALVRLAQLGAADRQWTRFVRGRPRRFT

SEQ ID NO: 41429 - protein, 49 aa, Artificial Sequence
  Quasi-synthetic sequence derived from human genome
KTNRIARILAGSKKKICTKKPRFMSACAQLVIAFILICIQLGIIVALFI

SEQ ID NO: 41430 - protein, 49 aa, Artificial Sequence
  Quasi-synthetic sequence derived from human genome
MALLKVKFDQKKRVKLAQGLWLMNWFSVLAGIIIFSLGLFLKIELRKRS

SEQ ID NO: 41431 - protein, 49 aa, Artificial Sequence
  Quasi-synthetic sequence derived from human genome
FFAPLLVICLCYLLIVVKVRAAGVRVGCVRRRSERKVTRMVLVVVLVFA

SEQ ID NO: 41432 - protein, 49 aa, Artificial Sequence
  Quasi-synthetic sequence derived from human genome
LAQTMKTLRLRKNTVKFSLYRHFKNTLIFAVLASIVFMGWTTKTFRIAK

SEQ ID NO: 41433 - protein, 49 aa, Artificial Sequence
  Quasi-synthetic sequence derived from human genome
RSGGQKLCSRFLLKCGFITIPWRCIKKCSPLMPRAAVPRFVQQKLYLFL

SEQ ID NO: 41434 - protein, 49 aa, Artificial Sequence
  Quasi-synthetic sequence derived from human genome
FLVLLFSQYARNVKFPLPIYKSKKGWTAYKLQLFKMFPIILAILVSWLL

SEQ ID NO: 41435 - protein, 49 aa, Artificial Sequence
  Quasi-synthetic sequence derived from human genome
RMKHLKTLPMVPFKTKDSPGVFSKLGVLLRRVTRNLVRNKLAVITRLLQ

SEQ ID NO: 41436 - protein, 49 aa, Artificial Sequence
  Quasi-synthetic sequence derived from human genome
LSTIVSQRKQIKRKAPRGFLKRVFKRKKPQLRLEKSGDLLVRFHPFSGW

SEQ ID NO: 41437 - protein, 49 aa, Artificial Sequence
  Quasi-synthetic sequence derived from human genome
RISITFFRLFRVMRLVKLLSRGEGIRTLLWTFIKSFQALPYVALLIVML

SEQ ID NO: 41438 - protein, 49 aa, Artificial Sequence
  Quasi-synthetic sequence derived from human genome
KSKFSRYWRRWNRFCRRKCRAAVKSNVFYWLVIFLVFLNTLTIASEHYN

SEQ ID NO: 41439 - protein, 49 aa, Artificial Sequence
  Quasi-synthetic sequence derived from human genome
LKTLTKPVTLSRSKINKTKVLKMIFVHLIIFCFCFVPYNINLILYSLVR

SEQ ID NO: 41440 - protein, 49 aa, Artificial Sequence
  Quasi-synthetic sequence derived from human genome
HFLLMKKSQIVIAAWYRRYAQQKRYQQTKSSALVIQSYIRGWKARKILR

SEQ ID NO: 41441 - protein, 49 aa, Artificial Sequence
  Quasi-synthetic sequence derived from human genome
RLLFRIGYSLYTRTWLGYLFYRQQLRRARNRYPKGHSKTQPRLFNGVKV

SEQ ID NO: 41442 - protein, 49 aa, Artificial Sequence
  Quasi-synthetic sequence derived from human genome
LLKELVRFQDRMYQKDPVKAKTKRRLVLGLREVLKHLKLKKLKCVIISP

SEQ ID NO: 41443 - protein, 49 aa, Artificial Sequence
  Quasi-synthetic sequence derived from human genome
LVTILCLLAAGFVVYLKRKTLIRLLFTNKKTTIEKLRCVRPSRPPRGFQ

SEQ ID NO: 41444 - protein, 49 aa, Artificial Sequence
  Quasi-synthetic sequence derived from human genome
KHSPHIAAARKVYIQTRRQRKLHFVVGGFAYLLPKTAVVLRCPARRVRK

SEQ ID NO: 41445 - protein, 49 aa, Artificial Sequence
  Quasi-synthetic sequence derived from human genome
MVLQRRKFLQMKRRKYGFIYKTHLFGRPTVRVMGADNVRRILLGEHRLV

SEQ ID NO: 41446 - protein, 49 aa, Artificial Sequence
  Quasi-synthetic sequence derived from human genome
LCYLFIIIKVKSSGIRVGSSKRKKSEKKVTRMVSIVVAVFIFCWLPFYI

SEQ ID NO: 41447 - protein, 49 aa, Artificial Sequence
  Quasi-synthetic sequence derived from human genome
RYFSITRPLTYRAKRTTKRAGVMIGLAWVISFVLWAPAILFWQYFVGKR

SEQ ID NO: 41448 - protein, 49 aa, Artificial Sequence
  Quasi-synthetic sequence derived from human genome
HLLGRLAAIVAKQVLLGRKVVVVRCEGINISGNFYRNKLKYLAFLRKRM

SEQ ID NO: 41449 - protein, 49 aa, Artificial Sequence
  Quasi-synthetic sequence derived from human genome
VRIQRAYKLYLAVKNANKQVNSVICIQRWFRARLQEKRFIQKYHSIKKI

SEQ ID NO: 41450 - protein, 49 aa, Artificial Sequence
  Quasi-synthetic sequence derived from human genome
FLRHVPLRRIHLFTLVQILCLAVLWILKSTVAAIIFPVMILGLIIVRRL

SEQ ID NO: 41451 - protein, 49 aa, Artificial Sequence
  Quasi-synthetic sequence derived from human genome
LWLRDTYKLWVPQPPPRTIKRTRRRLSRNRDPGRLILSTIRLRPRQVLC

SEQ ID NO: 41452 - protein, 49 aa, Artificial Sequence
  Quasi-synthetic sequence derived from human genome
FLLGFLLPVLAIGLCYLLIVGKMRAVALRAGWQQRRRSEKKITRLVLMV

SEQ ID NO: 41453 - protein, 49 aa, Artificial Sequence
  Quasi-synthetic sequence derived from human genome
RKPLSGRTPRLVYKWFLLIYKLSYAFGVVGYLAIMFTMCGFNLFFKIKA

SEQ ID NO: 41454 - protein, 49 aa, Artificial Sequence
  Quasi-synthetic sequence derived from human genome
KIVKSIVEKKPRTFIIKLIKWLMIAIPATFVNSAIRYLECKLALAFRTR

SEQ ID NO: 41455 - protein, 49 aa, Artificial Sequence
  Quasi-synthetic sequence derived from human genome
IARKLCAHYQQSGKHNKKLKKSIKIIFIVVAAFLVSWLPFNTFKFLAIV

SEQ ID NO: 41456 - protein, 49 aa, Artificial Sequence
  Quasi-synthetic sequence derived from human genome
APRGSRRPGRTPKWRLPRISARAPYRLRRLRRHTYWPPRRPVAASRCWP

SEQ ID NO: 41457 - protein, 49 aa, Artificial Sequence
  Quasi-synthetic sequence derived from human genome
VRRVVQIFRIMRILRILKLARHSTGLQSLGFTLRRSYNELGLLILFLAM

SEQ ID NO: 41458 - protein, 49 aa, Artificial Sequence
  Quasi-synthetic sequence derived from human genome
LPKYWDYRYKKNLKALYVVHPTSFIKVLWNILKPLISHKFGKKVIYFNY

SEQ ID NO: 41459 - protein, 49 aa, Artificial Sequence
  Quasi-synthetic sequence derived from human genome
RTLRAVRVLRPLKLVSGIPSLQVVLKSIMKAMVPLLQIGLLLFFAILMF

SEQ ID NO: 41460 - protein, 49 aa, Artificial Sequence
  Quasi-synthetic sequence derived from human genome
FRNPVIERIPRLRRQKKIFSKQQGKAFQRARQMNIDVATWVRLLRRLIP

SEQ ID NO: 41461 - protein, 49 aa, Artificial Sequence
  Quasi-synthetic sequence derived from human genome
RVSRLGRRLGRRRRPRSPPEPLRVRARLRLRSPSGAFAALGALVVLVGM

SEQ ID NO: 41462 - protein, 49 aa, Artificial Sequence
  Quasi-synthetic sequence derived from human genome
IVILYCRIYSLVRTRSRRLTFRKNISKASRSSEKSLALLKTVIIVLSVF

SEQ ID NO: 41463 - protein, 49 aa, Artificial Sequence
  Quasi-synthetic sequence derived from human genome
WYRCWRAHKEYLAILKAVKIIQGCFYTKLERTRFLNVRASAIIIQRKWR

SEQ ID NO: 41464 - protein, 49 aa, Artificial Sequence
  Quasi-synthetic sequence derived from human genome
AHNLTWIQYHSLDVIAFLLACVATVIFIITKFCLFCFRKLAKKGKKKKR

SEQ ID NO: 41465 - protein, 49 aa, Artificial Sequence
  Quasi-synthetic sequence derived from human genome
LILKNKLKVRTAYPSLRLIHAVRGYWLTNKVPIKRPSTGLLMYTLATRF

SEQ ID NO: 41466 - protein, 49 aa, Artificial Sequence
  Quasi-synthetic sequence derived from human genome
FISLTQTMKLLKLRRNIVKLSLYRHFTNTLILAVAASIVFIIWTTMKFR

SEQ ID NO: 41467 - protein, 49 aa, Artificial Sequence
  Quasi-synthetic sequence derived from human genome
MSSHKTFKIKQFLAKKQKQNRPIPQWIRMKTGNKIRYNSKRRHWKRTKL

SEQ ID NO: 41468 - protein, 49 aa, Artificial Sequence
  Quasi-synthetic sequence derived from human genome
LLVKLRLCFLVMAYGTTIFHPLLYAFTRQKFQKVLKSKMKKRVVSIVEA

SEQ ID NO: 41469 - protein, 49 aa, Artificial Sequence
  Quasi-synthetic sequence derived from human genome
ICRVLRSLKLLAQFRQIQIIILVLVRALKSMTFLLMLLLIFFYIFAVTG

SEQ ID NO: 41470 - protein, 49 aa, Artificial Sequence
  Quasi-synthetic sequence derived from human genome
RRTRRPRFVLMNKMDDLNLHYRFLNWRRRIREIREVRAFRYQERFKHIL

SEQ ID NO: 41471 - protein, 49 aa, Artificial Sequence
  Quasi-synthetic sequence derived from human genome
LISFGIQSSAINVVKILRVLRVLRPLRAINRAKGLKHVVQCVFVAIRTI

SEQ ID NO: 41472 - protein, 49 aa, Artificial Sequence
  Quasi-synthetic sequence derived from human genome
LFYFFSFTLFFSFPHLLSPSKIKTFLSLVWKRRILFFVVTLVSVFLVWK

SEQ ID NO: 41473 - protein, 49 aa, Artificial Sequence
  Quasi-synthetic sequence derived from human genome
PTISIVSYLFAKSNTVYNPVIYVFMIRKFRRSLLQLLCLRLLRCQRPAK

SEQ ID NO: 41474 - protein, 49 aa, Artificial Sequence
  Quasi-synthetic sequence derived from human genome
VWRQTRTLLLKNYLIKCRTKKSSVQEILFPLFFLFWLILISMMHPNKKY

SEQ ID NO: 41475 - protein, 49 aa, Artificial Sequence
  Quasi-synthetic sequence derived from human genome
RWLQKVARSLALALLCLVLSTCVGPYLFPYFIPLNGDRLLRNKKRKARW

SEQ ID NO: 41476 - protein, 49 aa, Artificial Sequence
  Quasi-synthetic sequence derived from human genome
VVRAVYRVLKNCPSVALKKKAKCLLSKWKAVYKQTHSKARNSPKLFPVR

SEQ ID NO: 41477 - protein, 49 aa, Artificial Sequence
  Quasi-synthetic sequence derived from human genome
RGRLMRLEYQRLLGGRDALFTIQWNIRAFNAVKNWSWMKLFFKMKPLLR

SEQ ID NO: 41478 - protein, 49 aa, Artificial Sequence
  Quasi-synthetic sequence derived from human genome
KLRLDKLRQSCVMVQKHMRGWLQRKKFLRERRAALIIQQYFRGQQTVRK

SEQ ID NO: 41479 - protein, 49 aa, Artificial Sequence
  Quasi-synthetic sequence derived from human genome
KFQGVKTPSQKRYVAYFAQVKHLYNWNLPPRRILFIKHFIIYSIPRYVR

SEQ ID NO: 41480 - protein, 49 aa, Artificial Sequence
  Quasi-synthetic sequence derived from human genome
TKSRMSAVAAEIKQIRARRKTARMLMIVLLVFAICYLPISILNVLKRVF

SEQ ID NO: 41481 - protein, 49 aa, Artificial Sequence
  Quasi-synthetic sequence derived from human genome
IFMVKIFMLLVVGITSGMWIWTSKTLQSWQQVCSRRLKKKSRRKPASVI

SEQ ID NO: 41482 - protein, 49 aa, Artificial Sequence
  Quasi-synthetic sequence derived from human genome
TWRRKKKSRMTFFVTQLAITEKQARVLIVIAWSLSFLFSIPTLIIFGKR

SEQ ID NO: 41483 - protein, 49 aa, Artificial Sequence
  Quasi-synthetic sequence derived from human genome
RISRRLRRPPHVGRARRNSLRIIFAIESTFVGSWLPFSALRAVFHLARL

SEQ ID NO: 41484 - protein, 49 aa, Artificial Sequence
  Quasi-synthetic sequence derived from human genome
CRGYLARQHFKKRKIQDLAIRCVQKNIKKNKGVKDWPWWKLFTTVRPLI

SEQ ID NO: 41485 - protein, 49 aa, Artificial Sequence
  Quasi-synthetic sequence derived from human genome
KIAKVQRIFTRRSKKLAVVHFFDHASAALARKKGKSLHKDMAIFWHRKK

SEQ ID NO: 41486 - protein, 49 aa, Artificial Sequence
  Quasi-synthetic sequence derived from human genome
FFGFHRLLLKWRGSIYKLLYREFIVFAVLYTAISLVYRLLLTGVQKRYF

SEQ ID NO: 41487 - protein, 49 aa, Artificial Sequence
  Quasi-synthetic sequence derived from human genome
FPIPRNSTVNIPLFRRFGRQRKIGGRGRIISPYRTPVLRRHRYSIFRST

SEQ ID NO: 41488 - protein, 49 aa, Artificial Sequence
  Quasi-synthetic sequence derived from human genome
GVSFLVLQRRRLPPVRPHGPGPARGRPPHPALPHRRRLHGRPVRRLFLL

SEQ ID NO: 41489 - protein, 49 aa, Artificial Sequence
  Quasi-synthetic sequence derived from human genome
KRRKSNPKPLVLSEARKQLMIYRLPQVLRLHLKRFRWSGRNHREKIGVH

SEQ ID NO: 41490 - protein, 49 aa, Artificial Sequence
  Quasi-synthetic sequence derived from human genome
KTRWLYGFIRFLLYFSCSLFTAALWGALAALFCLQYLGVRVLLRFQRKL

SEQ ID NO: 41491 - protein, 49 aa, Artificial Sequence
  Quasi-synthetic sequence derived from human genome
IQKAVRHFLLRKKQEKFTSGIIKIQALWRGYSWRKKNDCTKIKAIRLSL

SEQ ID NO: 41492 - protein, 49 aa, Artificial Sequence
  Quasi-synthetic sequence derived from human genome
MMRYLRASSNRNFLLTMRPFLKRAILVLSYVLVILYFRLWIMGGSMPLF

SEQ ID NO: 41493 - protein, 49 aa, Artificial Sequence
  Quasi-synthetic sequence derived from human genome
YALLFVFIYVQLWLVLRYRHKRLSYQSVFLFLCLFWASLRTVLFSFYFK

SEQ ID NO: 41494 - protein, 49 aa, Artificial Sequence
  Quasi-synthetic sequence derived from human genome
MLRTALRGAPRLLSRVQPRAPCLRRLWGRGARPEVAGRRRAWAWGWRRS

SEQ ID NO: 41495 - protein, 49 aa, Artificial Sequence
  Quasi-synthetic sequence derived from human genome
IFSYPSTHPFILILGNKKLKQIFLSVLRHVRYWVKDRSLRLHRFTRGAL

SEQ ID NO: 41496 - protein, 49 aa, Artificial Sequence
  Quasi-synthetic sequence derived from human genome
APRALLPQWPRRPGRRWPASPLGMKVFRRKALVLCAGYALLLVLTMLNL

SEQ ID NO: 41497 - protein, 49 aa, Artificial Sequence
  Quasi-synthetic sequence derived from human genome
LRKLNDLVKRARLVRVHAYIISYLKKEMPSVFGKENKKKQLILKLPVIF

SEQ ID NO: 41498 - protein, 49 aa, Artificial Sequence
  Quasi-synthetic sequence derived from human genome
KQRLSKKLRRKLQMWLWSQTFCPVLYAWNDLGSRFWPRYVKVGSCFSKR

SEQ ID NO: 41499 - protein, 49 aa, Artificial Sequence
  Quasi-synthetic sequence derived from human genome
FPRLARHDRGNYVRLNMKQKHYVRGRALRSRLLRKQAWKQKWRKKGECF

SEQ ID NO: 41500 - protein, 49 aa, Artificial Sequence
  Quasi-synthetic sequence derived from human genome
VRTLHQRFLAQLRKYFNMRVFRQRTYRIWAFGIAAAALGYFVPYVHLMK

SEQ ID NO: 41501 - protein, 49 aa, Artificial Sequence
  Quasi-synthetic sequence derived from human genome
RRSRWPFSKARSFCKTHASLFKKILLGLLCLAYAAYLLAACILNFQRAL

SEQ ID NO: 41502 - protein, 49 aa, Artificial Sequence
  Quasi-synthetic sequence derived from human genome
FRPGTSFGISVLRALRLLRIFKITKYWASLRNLVVSLMSSMKSIISLLF

SEQ ID NO: 41503 - protein, 49 aa, Artificial Sequence
  Quasi-synthetic sequence derived from human genome
RIKIFFALAPVFSTKYLKSPLIRMTYKWKSIVMAFSGNKDFLPKTSFKK

SEQ ID NO: 41504 - protein, 49 aa, Artificial Sequence
  Quasi-synthetic sequence derived from human genome
RISITFFRLFRVMRLVKLLSRGEGIRTLLWTFIKSFQALPYVALLIAML

SEQ ID NO: 41505 - protein, 49 aa, Artificial Sequence
  Quasi-synthetic sequence derived from human genome
RRRRRPLQRGKPPYSYIALIAMALAHAPGRRLTLAAIYRFITERFAFYR

SEQ ID NO: 41506 - protein, 49 aa, Artificial Sequence
  Quasi-synthetic sequence derived from human genome
FFIVPSHRRKIFPGLILSDIKPAKRMKFKTVCYLLVQLMHCRKMFKAEI

SEQ ID NO: 41507 - protein, 49 aa, Artificial Sequence
  Quasi-synthetic sequence derived from human genome
KRRRMVLEFYVQQEWAAVRLQSWVRMWCVRQRYCRLLNAVRIIQVYWRW

SEQ ID NO: 41508 - protein, 49 aa, Artificial Sequence
  Quasi-synthetic sequence derived from human genome
RMRRYRMTHSEKKRLKQCNVITRLRGLQVPVGLPFLLILLGLYLMPLGI

SEQ ID NO: 41509 - protein, 49 aa, Artificial Sequence
  Quasi-synthetic sequence derived from human genome
RWKYIQQVYLASFWLAMSSTMYNPIIYCCLNKRFRAGFKRAFRWCPFIK

SEQ ID NO: 41510 - protein, 49 aa, Artificial Sequence
  Quasi-synthetic sequence derived from human genome
HRLKSYMKFLFVREPFERLVSAYRNKFTQKYNISFHKRYGTKIIKRQRK

SEQ ID NO: 41511 - protein, 49 aa, Artificial Sequence
  Quasi-synthetic sequence derived from human genome
RKFKSLLLHKRTAIQHAYRLLISQRRPAGISYRQFEGLMRFYKPRMSAR

SEQ ID NO: 41512 - protein, 49 aa, Artificial Sequence
  Quasi-synthetic sequence derived from human genome
KPGTSFGISVLRALRLLRIFKVTKYWASLRNLVVSLLNSMKSIISLLFL

SEQ ID NO: 41513 - protein, 49 aa, Artificial Sequence
  Quasi-synthetic sequence derived from human genome
KILGVLRVLRLLRTLRPLRVISRAPGLKLVVETLISSLRPIGNIVLICC

SEQ ID NO: 41514 - protein, 49 aa, Artificial Sequence
  Quasi-synthetic sequence derived from human genome
LPWRAKMSRGNSKQRKLKINPKRYKGNFLQSCVQLRASRLRTPTWVRRR

SEQ ID NO: 41515 - protein, 49 aa, Artificial Sequence
  Quasi-synthetic sequence derived from human genome
RKLLIQAAIVRIMKMRKVLKHQQLLGEVLTQLSSRFKPRVPVIKKCIDI

SEQ ID NO: 41516 - protein, 49 aa, Artificial Sequence
  Quasi-synthetic sequence derived from human genome
EANPQYLGLARKKSGILLLTLVSFLIFILFIIVQLFIMKLRKAHVIWKK

SEQ ID NO: 41517 - protein, 49 aa, Artificial Sequence
  Quasi-synthetic sequence derived from human genome
ILIILTGRHRGKRVVFLKQLASGLLLVTGPLVLNRVPLRRTHQKFVIAT

SEQ ID NO: 41518 - protein, 49 aa, Artificial Sequence
  Quasi-synthetic sequence derived from human genome
MRPRSGGRPGATGRRRRRLRRRPRGLRCSRLPPPPPLPLLLGLLLAAAG

SEQ ID NO: 41519 - protein, 49 aa, Artificial Sequence
  Quasi-synthetic sequence derived from human genome
KALKAKKAVLKGVHSHKKKKIRTSPTFRRPKTLRLRRQPKYPRKSAPRR

SEQ ID NO: 41520 - protein, 49 aa, Artificial Sequence
  Quasi-synthetic sequence derived from human genome
RISSAFFRLFRVMRLIKLLSRAEGVRTLLWTFIKSFQALPYVALLIVML

SEQ ID NO: 41521 - protein, 49 aa, Artificial Sequence
  Quasi-synthetic sequence derived from human genome
KLFAIIVGRGIRKWWQALPPNKKEVVKENIRKNKWKLFLGLSSFGLLFV

SEQ ID NO: 41522 - protein, 49 aa, Artificial Sequence
  Quasi-synthetic sequence derived from human genome
ALLLLPLLLLLPLLLLKLHLWPQLRWLPADLAFAVRALCCKRALRARAL

SEQ ID NO: 41523 - protein, 49 aa, Artificial Sequence
  Quasi-synthetic sequence derived from human genome
MPRKRKCDLRAVRVGLLLGGGGVYGSRFRFTFPGCRALSPWRVRVQRRR

SEQ ID NO: 41524 - protein, 49 aa, Artificial Sequence
  Quasi-synthetic sequence derived from human genome
VGRVQGWALTRQQLQALLLKRFLLARRSRRGLFAQIVLPALFVGLALVF

SEQ ID NO: 41525 - protein, 49 aa, Artificial Sequence
  Quasi-synthetic sequence derived from human genome
FLNHSNLWFAAWLKVFYCLRIANFNHPLFFLMKRKIIVLMPWLLRLSVL

SEQ ID NO: 41526 - protein, 49 aa, Artificial Sequence
  Quasi-synthetic sequence derived from human genome
WQRRVATWFNQPARKIRRRKARQAKARRIAPRPASGPIRPIVRCPTVRY

SEQ ID NO: 41527 - protein, 49 aa, Artificial Sequence
  Quasi-synthetic sequence derived from human genome
QGKLMRIKFQKILEERDALILIQWNIRAFMAVKNWPWMRLFFKIKPLVK

SEQ ID NO: 41528 - protein, 49 aa, Artificial Sequence
  Quasi-synthetic sequence derived from human genome
LVHLCCSKLVNYLTPIKHLRKSLKIIYLNSIQQLEIRNMSWPRLIRKLR

SEQ ID NO: 41529 - protein, 49 aa, Artificial Sequence
  Quasi-synthetic sequence derived from human genome
LTQTMKLLKLRRNIVKLSLYRHFTNTLILAVAASIVFIIWTTMKFRIVT

SEQ ID NO: 41530 - protein, 49 aa, Artificial Sequence
  Quasi-synthetic sequence derived from human genome
SWWRNNFWIILAVAIIVVSVGLGLILYCVCKWQLRRGKKWEIAKPLKHK

SEQ ID NO: 41531 - protein, 49 aa, Artificial Sequence
  Quasi-synthetic sequence derived from human genome
KYVKVFHKLLNSNRHNTKHTGKKPFKCKKCGKSFCMLLHLCQHKRIHIR

SEQ ID NO: 41532 - protein, 49 aa, Artificial Sequence
  Quasi-synthetic sequence derived from human genome
KRWREELKRTGAPGAFHRWKVVLLVRTDKRSDSLIRKKFRMMKIPKPIL

SEQ ID NO: 41533 - protein, 49 aa, Artificial Sequence
  Quasi-synthetic sequence derived from human genome
RRLVRGSVCAGKLFIAPLIMVLGLALGAIAVVIGLFVFPIYCLCKKQRK

SEQ ID NO: 41534 - protein, 49 aa, Artificial Sequence
  Quasi-synthetic sequence derived from human genome
FVALLWKRLLIARRSRKGFFAQIVLPAVFVCIALVFSLIVPPFGKYPSL

SEQ ID NO: 41535 - protein, 49 aa, Artificial Sequence
  Quasi-synthetic sequence derived from human genome
FRLTYLIKKTWMFGLPFCKFVSAMLHIHMYLTFLFYVVILVTRYLIFFK

SEQ ID NO: 41536 - protein, 49 aa, Artificial Sequence
  Quasi-synthetic sequence derived from human genome
VYRGIRVRRHIQHMHRAATFIKAMFKMHQSRISYHTMRKAAIVIQVRCR

SEQ ID NO: 41537 - protein, 49 aa, Artificial Sequence
  Quasi-synthetic sequence derived from human genome
LHQLQLLLWKNVTLKRRSPWVLAFEIFIPLVLFFILLGLRQKKPTISVK

SEQ ID NO: 41538 - protein, 49 aa, Artificial Sequence
  Quasi-synthetic sequence derived from human genome
VQRWHWQKKVINKGLFFLGSLIAISSTYLLIHYMSPRSFLRLRRPWNWI

SEQ ID NO: 41539 - protein, 49 aa, Artificial Sequence
  Quasi-synthetic sequence derived from human genome
RKRRRQLRASVFALALPLSLGPCWALWVAVPKASATIRGPQRRLLASLL

SEQ ID NO: 41540 - protein, 49 aa, Artificial Sequence
  Quasi-synthetic sequence derived from human genome
KPFRVRKLLDLQAKMGMQPHLQALLSLYKFFAPALISVSLPVRKKIYFK

SEQ ID NO: 41541 - protein, 49 aa, Artificial Sequence
  Quasi-synthetic sequence derived from human genome
ILKAVKVLQASFRGVRVRRTLRKMQTAATLIQSNYRRYRQQTYFNKLKK

SEQ ID NO: 41542 - protein, 49 aa, Artificial Sequence
  Quasi-synthetic sequence derived from human genome
PRLLPRNTFSRKAFKLKKPSKYCSWKCAALSAIAAALLLAILLAYFIAM

SEQ ID NO: 41543 - protein, 49 aa, Artificial Sequence
  Quasi-synthetic sequence derived from human genome
PLKLMGPAGYLTWNYVLNEAIRLSLIMQLVALLLVVLWIRWKCRRLRIR

SEQ ID NO: 41544 - protein, 49 aa, Artificial Sequence
  Quasi-synthetic sequence derived from human genome
NFLGFLLPLLIMSYCYFRIIQTLFSCKNHKKAKAIKLILLVVIVFFLFW

SEQ ID NO: 41545 - protein, 49 aa, Artificial Sequence
  Quasi-synthetic sequence derived from human genome
RSILLKTLCKLVDVGSDSLSLKLAKIILALKVSRKNLLNVCKLIFKISR

SEQ ID NO: 41546 - protein, 49 aa, Artificial Sequence
  Quasi-synthetic sequence derived from human genome
YIYFIHSLCLLGRLLIYKQGRKLFPIKLKNKKGLVSLIDLLVLFTQLIY

SEQ ID NO: 41547 - protein, 49 aa, Artificial Sequence
  Quasi-synthetic sequence derived from human genome
KILRVLRVLRPLRAINRAKGLKHVVQCMFVAISTIGNIVLVTTLLQFMF

SEQ ID NO: 41548 - protein, 49 aa, Artificial Sequence
  Quasi-synthetic sequence derived from human genome
CHLCGQSFRGWVALVLHLRAHSAAKRPIACPKCERRFWRRKQLRAHLRR

SEQ ID NO: 41549 - protein, 49 aa, Artificial Sequence
  Quasi-synthetic sequence derived from human genome
PLRRGRPKRRRKPQPHSGSVLALPLRSRKIRKQLRSVVSRMAALRTQTL

SEQ ID NO: 41550 - protein, 49 aa, Artificial Sequence
  Quasi-synthetic sequence derived from human genome
ALLGWSWLRRRRARGIPPGPTPWPLVGNFGHVLLPPFLRRRSWLSSRTR

SEQ ID NO: 41551 - protein, 49 aa, Artificial Sequence
  Quasi-synthetic sequence derived from human genome
KQRFTKITQYLIRIRKLTLKRQRKLVPLSKKVERREKRREEKALIAAQL

SEQ ID NO: 41552 - protein, 49 aa, Artificial Sequence
  Quasi-synthetic sequence derived from human genome
VVRKSIARVLTVINQTQKENLRKFYKGKKYKPLDLRPKKTRAMRRRLNK

SEQ ID NO: 41553 - protein, 49 aa, Artificial Sequence
  Quasi-synthetic sequence derived from human genome
VKILRFSSPIFYGNVDGFKKCIKSTVGFDAIRVYNKRLKALRKIQKLIK

SEQ ID NO: 41554 - protein, 49 aa, Artificial Sequence
  Quasi-synthetic sequence derived from human genome
VQIILRISFLILLGIGIYALWKRSIQSIQKTLLFVITLYKLYKKGSHIF

SEQ ID NO: 41555 - protein, 49 aa, Artificial Sequence
  Quasi-synthetic sequence derived from human genome
LKSSLIRKPRIVSRGRRPRSQQYSVLFKQLGVNTVRKCYKCNICGKIFL

SEQ ID NO: 41556 - protein, 49 aa, Artificial Sequence
  Quasi-synthetic sequence derived from human genome
LLLLAFLQRRQRRRQDSRVVARSVRILVASFFLCWFPNHVVTLWGVLVK

SEQ ID NO: 41557 - protein, 49 aa, Artificial Sequence
  Quasi-synthetic sequence derived from human genome
AFCLFTWDKWLKVYKSIYFLGHIFFLSLLFILPYIHKAMVPRKEKLKKM

SEQ ID NO: 41558 - protein, 49 aa, Artificial Sequence
  Quasi-synthetic sequence derived from human genome
WLATSLSMFYLLRIANFSNLIFLRIKRRVKSVVLVILLGPLLFLVCHLF

SEQ ID NO: 41559 - protein, 49 aa, Artificial Sequence
  Quasi-synthetic sequence derived from human genome
MLYRFLARRTNSTFNQVVLKRLFMSRTNRPPLSLSRMIRKMKLPGRENK

SEQ ID NO: 41560 - protein, 49 aa, Artificial Sequence
  Quasi-synthetic sequence derived from human genome
LRCIRLLRIFKITKYWTSLSNLVASLLNSIRSIASLLLLLFLFIVIFAL

SEQ ID NO: 41561 - protein, 49 aa, Artificial Sequence
  Quasi-synthetic sequence derived from human genome
IYPGHGMMFVRNDCKVFRFCKSKCHKNFKKKRNPRKVRWTKAFRKAAGK

SEQ ID NO: 41562 - protein, 49 aa, Artificial Sequence
  Quasi-synthetic sequence derived from human genome
NIQKESTLHLVLRLRGGAKKRKKKSYTTPKKNKHKRKKVKLAVLKYYKV

SEQ ID NO: 41563 - protein, 49 aa, Artificial Sequence
  Quasi-synthetic sequence derived from human genome
LARSFALLLPVYALGYLGLSFSWVLLALALLAWCRRSRGLKALRLCRAL

SEQ ID NO: 41564 - protein, 49 aa, Artificial Sequence
  Quasi-synthetic sequence derived from human genome
IIFVPVPQLKSFQKIQVRLVRELEKKFSGKHVVFIAQRRILPKPTRKSR

SEQ ID NO: 41565 - protein, 49 aa, Artificial Sequence
  Quasi-synthetic sequence derived from human genome
MSSHKTFTIKRFLAKKQKQNRPIPQWIQMKPGSKIRYNSKRRHWRRTKL

SEQ ID NO: 41566 - protein, 49 aa, Artificial Sequence
  Quasi-synthetic sequence derived from human genome
VCPKYFMKLVNLYKGAVLYLLRGRKTFLIPVLFNNYITAALKLLEKLYK

SEQ ID NO: 41567 - protein, 49 aa, Artificial Sequence
  Quasi-synthetic sequence derived from human genome
RLFCVFYGLFGVPLCLTWISALGKFFGGRAKRLGQFLTKRGVSLRKAQI

SEQ ID NO: 41568 - protein, 49 aa, Artificial Sequence
  Quasi-synthetic sequence derived from human genome
IFILYTVRTKVFQSEASKVLMLLSSIGRRKSLPSVTRPRLRVKMYNFLR

SEQ ID NO: 41569 - protein, 49 aa, Artificial Sequence
  Quasi-synthetic sequence derived from human genome
LHSLAFKSYKPEIQNKLLIIKKKAKHKKHKSGKKSVSKKAITKKRKTVI

SEQ ID NO: 41570 - protein, 49 aa, Artificial Sequence
  Quasi-synthetic sequence derived from human genome
SRFKRSYNYKTIVKKILAKLKRARSKKLDNFQSEKKVFKKSFLRNCDLI

SEQ ID NO: 41571 - protein, 49 aa, Artificial Sequence
  Quasi-synthetic sequence derived from human genome
LKIANFSNLIFLHLKRRVKSVILVMLLGPLLFLACQLFVINMKEIVRTK

SEQ ID NO: 41572 - protein, 49 aa, Artificial Sequence
  Quasi-synthetic sequence derived from human genome
FVIQLQARLRGFLVRQKFAEHSHFLRTWLPAVIKIQAHWRGYRQRKIYL

SEQ ID NO: 41573 - protein, 49 aa, Artificial Sequence
  Quasi-synthetic sequence derived from human genome
CPGRLRGVRAVRPKVLMRLSKTKKHVSRAYGGSMCAKCVRDRIKRAFLI

SEQ ID NO: 41574 - protein, 49 aa, Artificial Sequence
  Quasi-synthetic sequence derived from human genome
IRNFHTSPRFQAAPVPLLLMILKPVQKLFAIIVGRGIRKWWQALPPNKK

SEQ ID NO: 41575 - protein, 49 aa, Artificial Sequence
  Quasi-synthetic sequence derived from human genome
WGPRAHRAYLTLLFATSIAGPGLLIGLLYARLARAYRRSQRASFKRARR

SEQ ID NO: 41576 - protein, 49 aa, Artificial Sequence
  Quasi-synthetic sequence derived from human genome
KCGGKCALVRHKFNRLPRVLILHLKRYSFNVALSLNNKIGQQVIIPRYL

SEQ ID NO: 41577 - protein, 49 aa, Artificial Sequence
  Quasi-synthetic sequence derived from human genome
RSLALALLCLVLSTCVGPYLFPYFIPLNGDRLLRNKKRKARGTMVRWLR

SEQ ID NO: 41578 - protein, 49 aa, Artificial Sequence
  Quasi-synthetic sequence derived from human genome
CIMYKVPLIRKKSLRRTLSERGLLKDFLKKHNLNPARKYFPQWKAPTLV

SEQ ID NO: 41579 - protein, 49 aa, Artificial Sequence
  Quasi-synthetic sequence derived from human genome
KLKLYFAQERNMNFTREQSRHPAWWFMSVKVKLKRKKRQKTPNRKLPRR

SEQ ID NO: 41580 - protein, 49 aa, Artificial Sequence
  Quasi-synthetic sequence derived from human genome
FLLPFLAVVASYSDIGRRLQARRFRRSRRTGRLVVLIILTFAAFWLPYH

SEQ ID NO: 41581 - protein, 49 aa, Artificial Sequence
  Quasi-synthetic sequence derived from human genome
WCFIRHGRTAYLQLYATLLLLLIVSVLACNFSVILNLIRMHRRSRRSRC

SEQ ID NO: 41582 - protein, 49 aa, Artificial Sequence
  Quasi-synthetic sequence derived from human genome
KFVRFLFYWNLYCSVLFLTCISVHRYLGICHPLRALRWGRPRLAGLLCL

SEQ ID NO: 41583 - protein, 49 aa, Artificial Sequence
  Quasi-synthetic sequence derived from human genome
LARIGRILRLIRAAKGIRTLLFALMMSLPALFNIGLLLFLVMFIYSIFG

SEQ ID NO: 41584 - protein, 49 aa, Artificial Sequence
  Quasi-synthetic sequence derived from human genome
VCIREKILLYKTHWMTPIFLKVVINTRRIKHHFKIHVPSQFFILITITK

SEQ ID NO: 41585 - protein, 49 aa, Artificial Sequence
  Quasi-synthetic sequence derived from human genome
GCPTNGPKIPSIATGMVGALLLLLVVALGIGLFMRRRHIVRKRTLRRLL

SEQ ID NO: 41586 - protein, 49 aa, Artificial Sequence
  Quasi-synthetic sequence derived from human genome
IIVIFCYLRIWILVLQVRQRVKPDRKPKLKPQDFRNFVTMFVVFVLFAI

SEQ ID NO: 41587 - protein, 49 aa, Artificial Sequence
  Quasi-synthetic sequence derived from human genome
LKIKLAVRMDKPQNMKHSGYLWAIGKNVWKRWKKRFFVLVQVSQYTFAM

SEQ ID NO: 41588 - protein, 49 aa, Artificial Sequence
  Quasi-synthetic sequence derived from human genome
MRLQRKAVISLQSYFRMRKARQYYLKMYKAIIVIQNYYHAYKAQVNQRK

SEQ ID NO: 41589 - protein, 49 aa, Artificial Sequence
  Quasi-synthetic sequence derived from human genome
MNYWLIIRLPILFAIGVNFLIFVRVICIVVSKLKANLMCKTDIKCRLAK

SEQ ID NO: 41590 - protein, 49 aa, Artificial Sequence
  Quasi-synthetic sequence derived from human genome
KKLLNGLCPKITYLFYKLFTLLSWMLSVVLLLFLNVKIALFLLLFLWLL

SEQ ID NO: 41591 - protein, 49 aa, Artificial Sequence
  Quasi-synthetic sequence derived from human genome
FLLLIPKFARWFSVPWKVIFVFALLAFLFFTSWYSSYGFTRRWNCILMR

SEQ ID NO: 41592 - protein, 49 aa, Artificial Sequence
  Quasi-synthetic sequence derived from human genome
RFLFNELRPAVCNDLSIMSKFKLLSSLPHWRRIAQKIIREPRKKRVPKK

SEQ ID NO: 41593 - protein, 49 aa, Artificial Sequence
  Quasi-synthetic sequence derived from human genome
AVDRYLRVKLTVRYKRVTTHRRIWLALGLCWLVSFLVGLTPMFGWNMKL

SEQ ID NO: 41594 - protein, 49 aa, Artificial Sequence
  Quasi-synthetic sequence derived from human genome
KLRPHLAKVLVYELLLGKGFRGGGGRWKALLGRHQARLKAELARLKVHR

SEQ ID NO: 41595 - protein, 49 aa, Artificial Sequence
  Quasi-synthetic sequence derived from human genome
IKVLLYMAFMTIMIKVHTFPLFAIRPMYLAMRQFKKAVTDAIMSRRAIR

SEQ ID NO: 41596 - protein, 49 aa, Artificial Sequence
  Quasi-synthetic sequence derived from human genome
IILALVLLVVLLVVCGPLAYKKLVKKFRQKKQRQWIGPTGMNQNMSFHR

SEQ ID NO: 41597 - protein, 49 aa, Artificial Sequence
  Quasi-synthetic sequence derived from human genome
LVHSLNLLAKQGLRLLRGLRRRNVQKKVALAKKLLAKLRFLAEEPQPPL

SEQ ID NO: 41598 - protein, 49 aa, Artificial Sequence
  Quasi-synthetic sequence derived from human genome
CVVIIQKRFRCFQAQKLYKRRKESILTIQKYYKAYLKGKIERTNYLQKR

SEQ ID NO: 41599 - protein, 49 aa, Artificial Sequence
  Quasi-synthetic sequence derived from human genome
KRPRCCSWCRRRRPLLRLPRRTPAKVPPQPAAPRSRDCFFRGPCMLCFI

SEQ ID NO: 41600 - protein, 49 aa, Artificial Sequence
  Quasi-synthetic sequence derived from human genome
KVLFYGRKIMRKVSQSTSSLVDTSVSATSRPRMRKKLKMLNIAKKILRI

SEQ ID NO: 41601 - protein, 49 aa, Artificial Sequence
  Quasi-synthetic sequence derived from human genome
RSKKAVWHKLLSKQRKRAVVACFRMAPLYNLPRHRAVNLFLQGYEKSWI

SEQ ID NO: 41602 - protein, 49 aa, Artificial Sequence
  Quasi-synthetic sequence derived from human genome
QPVKKNTLKKYKIACIVLLALLVIMSLGLGLGLGLRKLEKQGSCRKKCF

SEQ ID NO: 41603 - protein, 49 aa, Artificial Sequence
  Quasi-synthetic sequence derived from human genome
LWLKNRTLDEYLTCLLLWVKQRKDLLHLCCKKLKILGMPFRNIRSILKM

SEQ ID NO: 41604 - protein, 49 aa, Artificial Sequence
  Quasi-synthetic sequence derived from human genome
PRKKRRRSRLVLYPETSRKYRPRVEHRSRAQRCLLLLVAIVGFQVLNAI

SEQ ID NO: 41605 - protein, 49 aa, Artificial Sequence
  Quasi-synthetic sequence derived from human genome
RQKWIVKPPASARGIGIQVIHKWSQLPKRRPLLVQRYLHKPYLISGSKF

SEQ ID NO: 41606 - protein, 49 aa, Artificial Sequence
  Quasi-synthetic sequence derived from human genome
RRYFREATMKMAVMIFKRGVFESRRKNKAVFRPKIRINLREVQTLSWPR

SEQ ID NO: 41607 - protein, 49 aa, Artificial Sequence
  Quasi-synthetic sequence derived from human genome
VQKGWIRCNTTIRKSGFGGITMLFTGYFVLCCSWSFRRLKKLCRPLPWK

SEQ ID NO: 41608 - protein, 49 aa, Artificial Sequence
  Quasi-synthetic sequence derived from human genome
WKFKVSKIPGTFKQLTLNLGVMVPFILCLISFFLLLFSLVRHTKQIRLH

SEQ ID NO: 41609 - protein, 49 aa, Artificial Sequence
  Quasi-synthetic sequence derived from human genome
HSHIPLRPKHWFQLCRPMNPRARKNCSQIALFQKRRFQFFCSMRCRAWV

SEQ ID NO: 41610 - protein, 49 aa, Artificial Sequence
  Quasi-synthetic sequence derived from human genome
RRRKTVRLLLANLVIFLLCFVPYNSTLAVYGLLRSKLVAASVPARDRVR

SEQ ID NO: 41611 - protein, 49 aa, Artificial Sequence
  Quasi-synthetic sequence derived from human genome
KAFCRMVTRKLETQKCAALRIQFFLQMAVYRRRFVQQKRAAITLQHYFR

SEQ ID NO: 41612 - protein, 49 aa, Artificial Sequence
  Quasi-synthetic sequence derived from human genome
IKSAHKIAKRYSSIPQMWSRCLLRHCYGLWFICLPAYVKVCHSKVRALK

SEQ ID NO: 41613 - protein, 49 aa, Artificial Sequence
  Quasi-synthetic sequence derived from human genome
LIIQKHWRGYRERKNFHQQRQSLIEYKAAVTLQRAALKFLAKCRKKKKL

SEQ ID NO: 41614 - protein, 49 aa, Artificial Sequence
  Quasi-synthetic sequence derived from human genome
RTSILIICILITGLGIISVISHLTKRRRSQRNRRVGNTLKPFSRVLTPK

SEQ ID NO: 41615 - protein, 49 aa, Artificial Sequence
  Quasi-synthetic sequence derived from human genome
MKVRKRIKDCNKAAVTIQSKYRAYKTKKKYATYRASAIIIQRWYRGIKI

SEQ ID NO: 41616 - protein, 49 aa, Artificial Sequence
  Quasi-synthetic sequence derived from human genome
ITFFRLFRVMRLVKLLSRGEGIRTLLWTFIKSFQALPYVALLIVMLFFI

SEQ ID NO: 41617 - protein, 49 aa, Artificial Sequence
  Quasi-synthetic sequence derived from human genome
LRSICMHTKKRVSSFRGNKIGLKDVITLRRHVETKVRAKIRKRKVTTKI

SEQ ID NO: 41618 - protein, 49 aa, Artificial Sequence
  Quasi-synthetic sequence derived from human genome
PKHKKKVNKGSTAARTFYLIKDIRFLLHEPIVNKFREYKVFVRKLRKAY

SEQ ID NO: 41619 - protein, 49 aa, Artificial Sequence
  Quasi-synthetic sequence derived from human genome
KNGKFLYFLRSRVPGLPPTPVQLLYPVSRFSNVKSLQHLCRFRIRQLVR

SEQ ID NO: 41620 - protein, 49 aa, Artificial Sequence
  Quasi-synthetic sequence derived from human genome
KLYVALWAAFLASCFFPYRLVGLAVGLYAGIKFFLIDFIFKRCPRLRAK

SEQ ID NO: 41621 - protein, 49 aa, Artificial Sequence
  Quasi-synthetic sequence derived from human genome
ICLKQVFPKYAKQFNYLRLVDRMANLFIRFLGIKGTMKLGPTGFRTFIR

SEQ ID NO: 41622 - protein, 49 aa, Artificial Sequence
  Quasi-synthetic sequence derived from human genome
YKEFDRKYKKNLKALYVVHPTSFIKVLWNILKPLISHKFGKKVIYFNYL

SEQ ID NO: 41623 - protein, 49 aa, Artificial Sequence
  Quasi-synthetic sequence derived from human genome
MKTRVCRRLRRANRVLRARCRRAVKSNACYWAVLLLVFLNTLTIASEHH

SEQ ID NO: 41624 - protein, 49 aa, Artificial Sequence
  Quasi-synthetic sequence derived from human genome
VVIPLKVISRGRSAKAPGWLSYSLRFGGQKHVVHMRVKKLLVSRHLPVF

SEQ ID NO: 41625 - protein, 49 aa, Artificial Sequence
  Quasi-synthetic sequence derived from human genome
HRFRRSRSPMHYMYRPRSRSPRICHRFISRYRSRSRSRSPYRIRNPFRG

SEQ ID NO: 41626 - protein, 49 aa, Artificial Sequence
  Quasi-synthetic sequence derived from human genome
KKRNSTLYITMLLIVPVIVAGAIIVLLLYLKRLKIIIFPPIPDPGKIFK

SEQ ID NO: 41627 - protein, 49 aa, Artificial Sequence
  Quasi-synthetic sequence derived from human genome
LRCVRLLRIFKITRYWNSLSNLVASLLNSVRSIASLLLLLFLFIIIFSL

SEQ ID NO: 41628 - protein, 49 aa, Artificial Sequence
  Quasi-synthetic sequence derived from human genome
RLKVAITMLTARGIIRFVIGFSLPMSIVAICYGLIAAKIHKKGMIKSSR

SEQ ID NO: 41629 - protein, 49 aa, Artificial Sequence
  Quasi-synthetic sequence derived from human genome
KDREGTKINLAVANTGILVFQGFTKINAFNWAKVRKLSFKRKRFLIKLR

SEQ ID NO: 41630 - protein, 49 aa, Artificial Sequence
  Quasi-synthetic sequence derived from human genome
LARCPHCRKVSSIGRRYPRKRCICCFLLGLLLAVTATGLAFGTWKHARR

SEQ ID NO: 41631 - protein, 49 aa, Artificial Sequence
  Quasi-synthetic sequence derived from human genome
VWYRIAFWLQWFNSFVNPLLYPLCHKRFQKAFLKIFCIKKQPLPSQHSR

SEQ ID NO: 41632 - protein, 49 aa, Artificial Sequence
  Quasi-synthetic sequence derived from human genome
RLVALKKFVAVLAKYFPGRPLVQNFLHSVNEWLKRQKRNKIPYSFFKTA

SEQ ID NO: 41633 - protein, 49 aa, Artificial Sequence
  Quasi-synthetic sequence derived from human genome
AWKTHVWQDEKRRPKRREIPLKVLVKAVLFACMLMRKTMASRVRVTILF

SEQ ID NO: 41634 - protein, 49 aa, Artificial Sequence
  Quasi-synthetic sequence derived from human genome
KRIRKIKNVTNQIALLKLGKLPLLYKVGPVNVIQWFGQYFALFCWNYML

SEQ ID NO: 41635 - protein, 49 aa, Artificial Sequence
  Quasi-synthetic sequence derived from human genome
LDRSNAPNIPKLNRFLLLFIGFVCVLLSFFMARVFMRMKLPRSLALLPR

SEQ ID NO: 41636 - protein, 49 aa, Artificial Sequence
  Quasi-synthetic sequence derived from human genome
YQFILNLFSFLLRIKTSLLHEEVSLVEKKLFEKKYSVKRKKSRSKKVRR

SEQ ID NO: 41637 - protein, 49 aa, Artificial Sequence
  Quasi-synthetic sequence derived from human genome
VARKFASIARNQVRKKRQMAARERKVTRTIFAILLAFILTWTPYNVMVL

SEQ ID NO: 41638 - protein, 49 aa, Artificial Sequence
  Quasi-synthetic sequence derived from human genome
MAKPFFRLQKFLRRTQFLLFFLTAAYLMTGSLLLLQRVRVALPQGPRAP

SEQ ID NO: 41639 - protein, 49 aa, Artificial Sequence
  Quasi-synthetic sequence derived from human genome
LLLQTKNSSKVLFRKSEKYMKLFLWLLVGVGLLGLGLRHKAYERKLGKV

SEQ ID NO: 41640 - protein, 49 aa, Artificial Sequence
  Quasi-synthetic sequence derived from human genome
AKLKGDYRTGKRLNIRKVIPYIASQFRKDKIWLRRTKPSKRQYQICLAI

SEQ ID NO: 41641 - protein, 49 aa, Artificial Sequence
  Quasi-synthetic sequence derived from human genome
RCQPRSFLRDLVETTHLFLKMLERFCRSRGNLVVQNKQKKRRKKKKKVL

SEQ ID NO: 41642 - protein, 49 aa, Artificial Sequence
  Quasi-synthetic sequence derived from human genome
LIQKYYRSYKKCGKRRQARRTAVIVQQKLRSSLLTKKQDQAARKIMRFL

SEQ ID NO: 41643 - protein, 49 aa, Artificial Sequence
  Quasi-synthetic sequence derived from human genome
GKKKTTFFKRGKKLKCYLMPFGTGTSKCPGRFFALMEIKQLLVILLTYF

SEQ ID NO: 41644 - protein, 49 aa, Artificial Sequence
  Quasi-synthetic sequence derived from human genome
RIQIWAELAKVARKQGVWDVCRTASRFCLLYDNVKVKKLRLRRGKKKRG

SEQ ID NO: 41645 - protein, 49 aa, Artificial Sequence
  Quasi-synthetic sequence derived from human genome
KIFCCLFFITLFFIRLLSYMFFHVRFINPDLLVNVLPKVLGRSTLWKLR

SEQ ID NO: 41646 - protein, 49 aa, Artificial Sequence
  Quasi-synthetic sequence derived from human genome
RLALLLLLLLLPLPSGAWYKHVASPRYHTVGRAAGLLMGLRRSPYLWRR

SEQ ID NO: 41647 - protein, 49 aa, Artificial Sequence
  Quasi-synthetic sequence derived from human genome
IKAMNAAGCLKPKFPFLSIRRSALLYIALHLKAFNPKGSEYTRKKYKKK

SEQ ID NO: 41648 - protein, 49 aa, Artificial Sequence
  Quasi-synthetic sequence derived from human genome
FLGKKFLREKNKMTKKQTRNRQNKFPPKPALRSSPVHRVQHFPLLWKVK

SEQ ID NO: 41649 - protein, 49 aa, Artificial Sequence
  Quasi-synthetic sequence derived from human genome
WWAYAIHGVLEVNVCPRLWMWSWKHIRKHRQKVKQYKELYKKKLTSKKP

SEQ ID NO: 41650 - protein, 49 aa, Artificial Sequence
  Quasi-synthetic sequence derived from human genome
ALTIIRYYRRYKVKSYIHEVARRFHGVKTMRDYGKHVKWPSPPKVLRRF

SEQ ID NO: 41651 - protein, 49 aa, Artificial Sequence
  Quasi-synthetic sequence derived from human genome
RSFRRHIRQHSALTRLRLRNVFRRFLRDFQPGRLSQQMVMVKYLATLER

SEQ ID NO: 41652 - protein, 49 aa, Artificial Sequence
  Quasi-synthetic sequence derived from human genome
IIYCHKLTIILTKWRNTARHKSKKKEDELILKHELQLKKWKNRLILKRA

SEQ ID NO: 41653 - protein, 49 aa, Artificial Sequence
  Quasi-synthetic sequence derived from human genome
MACASVKRNVTDFLKRATLKNLRKQYRNVKKMTAKELVKVLFSFFWMLF

SEQ ID NO: 41654 - protein, 49 aa, Artificial Sequence
  Quasi-synthetic sequence derived from human genome
GIIKTLLRCPSKKKYKAIRLIFVIMAVFFIFWTPYNVAILLSSYQSILF

SEQ ID NO: 41655 - protein, 49 aa, Artificial Sequence
  Quasi-synthetic sequence derived from human genome
VRLASLNQILDPWVYLLLRKILLRKFCQMRKRRLREQLICSLQNSQIQR

SEQ ID NO: 41656 - protein, 49 aa, Artificial Sequence
  Quasi-synthetic sequence derived from human genome
RRAAVVIQAFTRAMFVRRTYRQVLMEHKATTIQKHVRGWMARRHFQRLR

SEQ ID NO: 41657 - protein, 49 aa, Artificial Sequence
  Quasi-synthetic sequence derived from human genome
IIRIMRVLRIARVLKLLKMAVGMRALLDTVGNLGLLFMLLFFIFAALGV

SEQ ID NO: 41658 - protein, 49 aa, Artificial Sequence
  Quasi-synthetic sequence derived from human genome
RKALKVKRPRFDVSLVYLTRKFMDLVRSAPGGILDLNKVATKLGVRKRR

SEQ ID NO: 41659 - protein, 49 aa, Artificial Sequence
  Quasi-synthetic sequence derived from human genome
KLVLMIGDIVTVIFPSSHSFILIMGNSKLREAFLKMLRFVKCFLRRRKP

SEQ ID NO: 41660 - protein, 49 aa, Artificial Sequence
  Quasi-synthetic sequence derived from human genome
MRFMLLFSRQGKLRLQKWYLATSDKERKKMVRELMQVVLARKPKMCSFL

SEQ ID NO: 41661 - protein, 49 aa, Artificial Sequence
  Quasi-synthetic sequence derived from human genome
LLFLPLLVNLCCPYFFQDIGYFLKVAAVGRRVRSYGKRRPARTILRAFL

SEQ ID NO: 41662 - protein, 49 aa, Artificial Sequence
  Quasi-synthetic sequence derived from human genome
MGNFRGHALPGTFFFIIGLWWCTKSILKYICKKQKRTCYLGSKTLFYRL

SEQ ID NO: 41663 - protein, 49 aa, Artificial Sequence
  Quasi-synthetic sequence derived from human genome
LIISSILGSVWLAYKTPKLLRTARGRRIKKCATQLCRRCKTVCQFRASA

SEQ ID NO: 41664 - protein, 49 aa, Artificial Sequence
  Quasi-synthetic sequence derived from human genome
LLLVALSALFLGRWLVVRLATKWCQRKLQAELKIGSFRFFWIQNVSLKF

SEQ ID NO: 41665 - protein, 49 aa, Artificial Sequence
  Quasi-synthetic sequence derived from human genome
ALCTLRGRRCHCLPFPKRGMQRWMLPLRRGARLLPLASSKNPRARSPGL

SEQ ID NO: 41666 - protein, 49 aa, Artificial Sequence
  Quasi-synthetic sequence derived from human genome
RMYFVFAQMLSSVSTWLAIILLIFISLFPEILLIVLKNVRRRSARVTKR

SEQ ID NO: 41667 - protein, 49 aa, Artificial Sequence
  Quasi-synthetic sequence derived from human genome
KRAAAIQLQAAFRRLKAHNLCRQIRAACVIQSYWRMRQDRVRFLNLKKT

SEQ ID NO: 41668 - protein, 49 aa, Artificial Sequence
  Quasi-synthetic sequence derived from human genome
RKYKQLTWIALKFALYKKMTQAAILIQSKFRSYYEQKRFQQSRRAAVLI

SEQ ID NO: 41669 - protein, 49 aa, Artificial Sequence
  Quasi-synthetic sequence derived from human genome
FKSMSGTIQLGRKLITKYNRRELTDKLLIFLALALFLATVLYIVKKRLF

SEQ ID NO: 41670 - protein, 49 aa, Artificial Sequence
  Quasi-synthetic sequence derived from human genome
LWLKNRTLDEHLTCLLLWVKQRKDLLHLCCKKLKILGMPFRNIRSILKM

SEQ ID NO: 41671 - protein, 49 aa, Artificial Sequence
  Quasi-synthetic sequence derived from human genome
IVARKIVKMTKQPAKKKPPPSREKKVTRTILAILLAFIITWAPYNVMVL

SEQ ID NO: 41672 - protein, 49 aa, Artificial Sequence
  Quasi-synthetic sequence derived from human genome
RLILFLFCLMVLVESRKPKRKRWTGQVEMPKPSHLYKKNLDVTKIRKGK

SEQ ID NO: 41673 - protein, 49 aa, Artificial Sequence
  Quasi-synthetic sequence derived from human genome
MATVVAITVLISTATFWRNKKSNKVLPMRRVLRKRPSPAPRTIRIEWLK

SEQ ID NO: 41674 - protein, 49 aa, Artificial Sequence
  Quasi-synthetic sequence derived from human genome
RPRRRDPRRRRTPALPRPWPGRGGPGRSLLHRHLFIQQLLRTCWPALPR

SEQ ID NO: 41675 - protein, 49 aa, Artificial Sequence
  Quasi-synthetic sequence derived from human genome
RFVKWPRYIRLQRQRAILYKRLKVPPAINQFTQALDRQTATQLLKLAHK

SEQ ID NO: 41676 - protein, 49 aa, Artificial Sequence
  Quasi-synthetic sequence derived from human genome
KLGFPKKVYKPIILQQKPRKASEKQSIWIRTKPSDIIRKYISKYSVFLR

SEQ ID NO: 41677 - protein, 49 aa, Artificial Sequence
  Quasi-synthetic sequence derived from human genome
IVKQGYVKIRSRKLGIFRRCWLVFKKASSKGPRRLEKFPDEKAAYFRNF

SEQ ID NO: 41678 - protein, 49 aa, Artificial Sequence
  Quasi-synthetic sequence derived from human genome
LLMVLRCLRPLRIFKLVPQMRKVVRELFSGFKEIFLVSILLLTLMLVFA

SEQ ID NO: 41679 - protein, 49 aa, Artificial Sequence
  Quasi-synthetic sequence derived from human genome
KLVKPKKKRRKKSVYTVGLRGLINLGNTCFMNCIVQALTHIPLLKDFFL

SEQ ID NO: 41680 - protein, 49 aa, Artificial Sequence
  Quasi-synthetic sequence derived from human genome
TGLNMRVIQVWFQNRRSKERRMKQLSALGARRHAFFRSPRRMRPLGGRL

SEQ ID NO: 41681 - protein, 49 aa, Artificial Sequence
  Quasi-synthetic sequence derived from human genome
CLQNFLKITSTRLLCSRLCQQLRSKRKFFGTVPISRLHRRVVITGIGLV

SEQ ID NO: 41682 - protein, 49 aa, Artificial Sequence
  Quasi-synthetic sequence derived from human genome
LLWIDAKVAARMVWRLLHGQVLTRRERRRLLRTCVDFFRLVPFMVFLIV

SEQ ID NO: 41683 - protein, 49 aa, Artificial Sequence
  Quasi-synthetic sequence derived from human genome
MFLAELIEKYFVSPTLFRVIRLARIGRILRLIKGAKGIRTLLFALMMSL

SEQ ID NO: 41684 - protein, 49 aa, Artificial Sequence
  Quasi-synthetic sequence derived from human genome
FAICIFLFSFIVPVLVISVCYSLMIRRLRGVRLLSGSREKDRNLRRITR

SEQ ID NO: 41685 - protein, 49 aa, Artificial Sequence
  Quasi-synthetic sequence derived from human genome
WKWIVGPMFLYLCERLVRFWRSQQKVVITKVVTHPFKTIELQMKKKGFK

SEQ ID NO: 41686 - protein, 49 aa, Artificial Sequence
  Quasi-synthetic sequence derived from human genome
LLAALILCLLVVRFDPASPSSLHFLYKLAQLFRWIRKAAFSRLYQLRIR

SEQ ID NO: 41687 - protein, 49 aa, Artificial Sequence
  Quasi-synthetic sequence derived from human genome
KWCIRHFYKPMLRRGSSKWMARTGVFLASAFFHEYLVSVPLRMFRLWAF

SEQ ID NO: 41688 - protein, 49 aa, Artificial Sequence
  Quasi-synthetic sequence derived from human genome
RKITSRPFTRFRTAVRVVIAILRLRFLVKKWQEVDRKGALAQGKAPRPG

SEQ ID NO: 41689 - protein, 49 aa, Artificial Sequence
  Quasi-synthetic sequence derived from human genome
KVAVIASIVSCAIILLMSMAFLTCCLLKCVKKSKRRRSNRSAQLWSQLK

SEQ ID NO: 41690 - protein, 49 aa, Artificial Sequence
  Quasi-synthetic sequence derived from human genome
LYRRLGKPLPPNVGFFHTAPPTGRRRKTSKSKLKAGKLLNPLVRQLKVV

SEQ ID NO: 41691 - protein, 49 aa, Artificial Sequence
  Quasi-synthetic sequence derived from human genome
VRLGRKRPLPACPNPLFVRWLTEWRDEATRSRRRTRFVFQKALRSLRRY

SEQ ID NO: 41692 - protein, 49 aa, Artificial Sequence
  Quasi-synthetic sequence derived from human genome
KMNILGLLIPFTIFMFCYIKILHQLKRCQNHNKTKAIRLVLIVVIASLL

SEQ ID NO: 41693 - protein, 49 aa, Artificial Sequence
  Quasi-synthetic sequence derived from human genome
LIGTWALFFRKRRADMPRVFVFRALLLVLIFLFVVSYWLFYGVRILDSR

SEQ ID NO: 41694 - protein, 49 aa, Artificial Sequence
  Quasi-synthetic sequence derived from human genome
FKRLILFRPFGPIMKVKNEKLNMANTLINVIVPLAKRVDKFRQFMQNFR

SEQ ID NO: 41695 - protein, 49 aa, Artificial Sequence
  Quasi-synthetic sequence derived from human genome
LLPSVTELFPEFRPGKVLRFLRLFGPGKNVPSVWRSARRKRKKKHRELI

SEQ ID NO: 41696 - protein, 49 aa, Artificial Sequence
  Quasi-synthetic sequence derived from human genome
LKRAASAIYRLFDYRGRLSPVPVPRAVPVKRPRVTVPLVRRVKTNVPVK

SEQ ID NO: 41697 - protein, 49 aa, Artificial Sequence
  Quasi-synthetic sequence derived from human genome
VVVRVPQYFKDLFRILGSERKKTIANYLVWRMVYSRIPNLSRRFQYRWL

SEQ ID NO: 41698 - protein, 49 aa, Artificial Sequence
  Quasi-synthetic sequence derived from human genome
IPVFAFLGAMVVLAFFVVQINKAKSRPKRRKPRVKRPQLMQQVHPPKTP

SEQ ID NO: 41699 - protein, 49 aa, Artificial Sequence
  Quasi-synthetic sequence derived from human genome
TCLAVLGRALPTSRLDLACSLSWNVIRYSLQKLRLVRWLLKKVFQCRRA

SEQ ID NO: 41700 - protein, 49 aa, Artificial Sequence
  Quasi-synthetic sequence derived from human genome
YRTYRCAHPLATLFKILASFYISLVIFYGLICMYTLWWMLRRSLKKYSF

SEQ ID NO: 41701 - protein, 49 aa, Artificial Sequence
  Quasi-synthetic sequence derived from human genome
QSWRRRKSLWLALSASWLLLVLLGGFSLLRLALPPRPRPGASQGWPRWL

SEQ ID NO: 41702 - protein, 49 aa, Artificial Sequence
  Quasi-synthetic sequence derived from human genome
IVKRKREENLKMVWRINPAHRKLQARLDQMRKFRRQHEQLRAVIVRVLR

SEQ ID NO: 41703 - protein, 49 aa, Artificial Sequence
  Quasi-synthetic sequence derived from human genome
IHNPLRYSSILTSNRVAKMGLILAIRSILLVIPFPFTLRRLKYCQKNLL

SEQ ID NO: 41704 - protein, 49 aa, Artificial Sequence
  Quasi-synthetic sequence derived from human genome
RMWRIRRRYCQVLNAVRIIQAYWRCRSCASRGFIKGQYRVTANQLHLQL

SEQ ID NO: 41705 - protein, 49 aa, Artificial Sequence
  Quasi-synthetic sequence derived from human genome
VVRSSVHARWIVGKVIGTKMQKTAKVRVTRLVLDPYLLKYFNKRKTYFA

SEQ ID NO: 41706 - protein, 49 aa, Artificial Sequence
  Quasi-synthetic sequence derived from human genome
FHFNRYLTRRRRIEIAHTLCLSERQVKIWFQNRRMKWKKDHKLPNTKMR

SEQ ID NO: 41707 - protein, 49 aa, Artificial Sequence
  Quasi-synthetic sequence derived from human genome
WRQQLAARRQEQRATVRALWFWAFSLQAKVWATWLAFVLERRRKKARLQ

SEQ ID NO: 41708 - protein, 49 aa, Artificial Sequence
  Quasi-synthetic sequence derived from human genome
RQKGLRSICMHTKKRVSSFRGNKIGLKDVITLRRHVETKVRAKIRKRKV

SEQ ID NO: 41709 - protein, 49 aa, Artificial Sequence
  Quasi-synthetic sequence derived from human genome
ILFLTCISVHRCLGVLRPLRSLRWGRARYARRVAGAVWVLVLACQAPVL

SEQ ID NO: 41710 - protein, 49 aa, Artificial Sequence
  Quasi-synthetic sequence derived from human genome
RSGKKKMSKLSRSARAGVIFPVGRLMRYLKKGTFKYRISVGAPVYMAAV

SEQ ID NO: 41711 - protein, 49 aa, Artificial Sequence
  Quasi-synthetic sequence derived from human genome
KLRWLGLHTFIRHKRTMVKTSVLVVQFVEAIVVLVRQMSHVRVTRALRC

SEQ ID NO: 41712 - protein, 49 aa, Artificial Sequence
  Quasi-synthetic sequence derived from human genome
LRVLRLLRTLRPLRVISRAPGLKLVVETLISSLKPIGNIVLICCAFFII

SEQ ID NO: 41713 - protein, 49 aa, Artificial Sequence
  Quasi-synthetic sequence derived from human genome
KPPISRAKMILITKAAIKAIKLYKHVVQIVEKFIKKCKPEYKVPGLYVI

SEQ ID NO: 41714 - protein, 49 aa, Artificial Sequence
  Quasi-synthetic sequence derived from human genome
LRALLLWGRRLRPLLRAPALAAVPGGKPILCPRRTTAQLGPRRNPAWSL

SEQ ID NO: 41715 - protein, 49 aa, Artificial Sequence
  Quasi-synthetic sequence derived from human genome
YRYCCKLNKKLKSYSLSRKKIVHYTCFDQRKRANAAFLIGAYAVIYLKK

SEQ ID NO: 41716 - protein, 49 aa, Artificial Sequence
  Quasi-synthetic sequence derived from human genome
ADAKLLFTPQHKMLRLRLPNLKMVRLRVSFSAVVFKAVSDICKILNIRR

SEQ ID NO: 41717 - protein, 49 aa, Artificial Sequence
  Quasi-synthetic sequence derived from human genome
PFYRNHKTFMVLNRKRTIYRFSAKHALFIFGPFNSIRSLAIRVSVHSLF

SEQ ID NO: 41718 - protein, 49 aa, Artificial Sequence
  Quasi-synthetic sequence derived from human genome
HANRPKRLLLVLVSAFFIFWSPFNVVLLVHLWRRVMLKEIYHPRMLLIL

SEQ ID NO: 41719 - protein, 49 aa, Artificial Sequence
  Quasi-synthetic sequence derived from human genome
MILRLKSVRMLSGSKEKDRNLRRITRMVLVVVAVFIVCWTPIHIYVIIK

SEQ ID NO: 41720 - protein, 49 aa, Artificial Sequence
  Quasi-synthetic sequence derived from human genome
KRNWRKPRGIDNRVRRRFKGQILMPNIGYGSNKKTKHMLPSGFRKFLVH

SEQ ID NO: 41721 - protein, 49 aa, Artificial Sequence
  Quasi-synthetic sequence derived from human genome
LINWFICSLCVPRVRKLWSSRRPRTRRNLLLGTACAIYLGFLVSQVGRA

SEQ ID NO: 41722 - protein, 49 aa, Artificial Sequence
  Quasi-synthetic sequence derived from human genome
RVIQTAFRKYKGRRLKEQQEVAAAVIQRCYRKYKQLTWIALKFALYKKM

SEQ ID NO: 41723 - protein, 49 aa, Artificial Sequence
  Quasi-synthetic sequence derived from human genome
KIKRTPSATFQQATKIKKLRAGKLSPLKSKFKTGKLQIGRKGVQIVRRR

SEQ ID NO: 41724 - protein, 49 aa, Artificial Sequence
  Quasi-synthetic sequence derived from human genome
KKKNTFIVLNKNRTIFRFNAASILCTLSPFNCIRRTTIKVLVHPFFQLF

SEQ ID NO: 41725 - protein, 49 aa, Artificial Sequence
  Quasi-synthetic sequence derived from human genome
LRVLPSVFWSPPSRKKPVLSARNSRMFGHLSPVRIPHLRGKFNLRLPSL

SEQ ID NO: 41726 - protein, 49 aa, Artificial Sequence
  Quasi-synthetic sequence derived from human genome
FVGGFVVMRFSLAVLYQACCVALLLWLALLLSIQRRLPRERKIKYSKLL

SEQ ID NO: 41727 - protein, 49 aa, Artificial Sequence
  Quasi-synthetic sequence derived from human genome
FVIRIRGINGVSPKVRKVLQLLRLRQIFNGTFVKLNKASINMLRIVEPY

SEQ ID NO: 41728 - protein, 49 aa, Artificial Sequence
  Quasi-synthetic sequence derived from human genome
FHYNRYLTRRRRVEIAHALCLSERQIKIWFQNRRMKWKKDHKLPNTKIR

SEQ ID NO: 41729 - protein, 49 aa, Artificial Sequence
  Quasi-synthetic sequence derived from human genome
SQKVKKIWQKQFRWPKNRLQILKFCKAREDLLKIQKERDFHRMHHKRIV

SEQ ID NO: 41730 - protein, 49 aa, Artificial Sequence
  Quasi-synthetic sequence derived from human genome
PVRRRRRRPGGRVPKDRPSLTVTPKRWKLRARPSLTVTPRRLGLRARPP

SEQ ID NO: 41731 - protein, 49 aa, Artificial Sequence
  Quasi-synthetic sequence derived from human genome
LRCVRLLRIFKVTRHWASLSNLVASLLNSMKSIASLLLLLFLFIIIFSL

SEQ ID NO: 41732 - protein, 49 aa, Artificial Sequence
  Quasi-synthetic sequence derived from human genome
LKAKRKVVKMMIIVVMTFAICWLPYHIYFILTAIYQQLNRWKYIQQVYL

SEQ ID NO: 41733 - protein, 49 aa, Artificial Sequence
  Quasi-synthetic sequence derived from human genome
LLYRKAAVVLQNHYRAFLSAKHQRQVYLQIRSSVIIIQARSKGFIQKRK

SEQ ID NO: 41734 - protein, 49 aa, Artificial Sequence
  Quasi-synthetic sequence derived from human genome
VVAVFCILWNWNKRKKRQVPYLRVTVMPLLTLPQTRQRAKNIYDILPWR

SEQ ID NO: 41735 - protein, 49 aa, Artificial Sequence
  Quasi-synthetic sequence derived from human genome
RIIGAVLKIKTASGRKKAFSTCASHLAVVLIFFGSIIFMYVRLKKSYSL

SEQ ID NO: 41736 - protein, 49 aa, Artificial Sequence
  Quasi-synthetic sequence derived from human genome
RICSSAPLLYFLFICPFVLLLLLLISLLCLYWKARKLSTLRSNTRKEKA

SEQ ID NO: 41737 - protein, 49 aa, Artificial Sequence
  Quasi-synthetic sequence derived from human genome
KRPVGKGRKQPEPLEKPSRPKTSFNWFVNPLKTFVFFIWRRYWRTLVLL

SEQ ID NO: 41738 - protein, 49 aa, Artificial Sequence
  Quasi-synthetic sequence derived from human genome
RFGEHLPRVVHLFMSYVYLLVPPLMNPIIYSIKTKQIRQRIIKKFQFIK

SEQ ID NO: 41739 - protein, 49 aa, Artificial Sequence
  Quasi-synthetic sequence derived from human genome
ACRGKDPTRRELSLGRKKAPHRLCGRFSRISMKLPRIPLRRQKLPKVVV

SEQ ID NO: 41740 - protein, 49 aa, Artificial Sequence
  Quasi-synthetic sequence derived from human genome
RGYLARQRYQQMRRSLVKFRSLVHAYVSRRRYLKLRAEWRCQVEGALLW

SEQ ID NO: 41741 - protein, 49 aa, Artificial Sequence
  Quasi-synthetic sequence derived from human genome
QKRRRAKKARLLGPTVMLGGCEFSRQRLQAFGLNPKRLHFRQLGRQRRK

SEQ ID NO: 41742 - protein, 49 aa, Artificial Sequence
  Quasi-synthetic sequence derived from human genome
QVPGPLFKFFFWIGYCNSSLNPVIYTVFNQDFRRSFKHILFRRRRRGFR

SEQ ID NO: 41743 - protein, 49 aa, Artificial Sequence
  Quasi-synthetic sequence derived from human genome
ILFCLRLMHIFTISKTLGPKIIIVKRMMKDVFFFLFLLAVWVVSFGVAK

SEQ ID NO: 41744 - protein, 49 aa, Artificial Sequence
  Quasi-synthetic sequence derived from human genome
KILGMLRVLRLLRTLRPLRVISRAQGLKLVVETLMSSLKPIGNIVVICC

SEQ ID NO: 41745 - protein, 49 aa, Artificial Sequence
  Quasi-synthetic sequence derived from human genome
RRGHVRIVSFLLRRNANVNLKNQKERTCLHYAVKKKFTFIDYLLIILLM

SEQ ID NO: 41746 - protein, 49 aa, Artificial Sequence
  Quasi-synthetic sequence derived from human genome
ILSIVGMFLADIIEKYFVSPTLFRVIRLARIGRILRLIKGAKGIRTLLF

SEQ ID NO: 41747 - protein, 49 aa, Artificial Sequence
  Quasi-synthetic sequence derived from human genome
LSLLGKKKKRLRVDKWWGNRKELATVRTICSHVQNMIKGVTLGFRYKMR

SEQ ID NO: 41748 - protein, 49 aa, Artificial Sequence
  Quasi-synthetic sequence derived from human genome
IKIQSSYRRWMIRKRMREMHRAATFIQSTFRMHRLHMRYQALKQASVVI

SEQ ID NO: 41749 - protein, 49 aa, Artificial Sequence
  Quasi-synthetic sequence derived from human genome
RTFRLMRVLKLVRFLPALQRQLVVLMKTMDNVATFCMLLMLFIFIFSIL

SEQ ID NO: 41750 - protein, 49 aa, Artificial Sequence
  Quasi-synthetic sequence derived from human genome
RRLVQLLRQHSSPWQVYGFVRACLRRLVPPGLWGSRHNERRFLRNTKKF

SEQ ID NO: 41751 - protein, 49 aa, Artificial Sequence
  Quasi-synthetic sequence derived from human genome
MRKRKISVCQQTWALLCKNFLKKWRMKRESLMEWLNSLLLLLCLYIYPH

SEQ ID NO: 41752 - protein, 49 aa, Artificial Sequence
  Quasi-synthetic sequence derived from human genome
RRLQTQVFKLGLAKSIHHARVLIRQRHIRVRKQVVNIPSFIVRLDSQKH

SEQ ID NO: 41753 - protein, 49 aa, Artificial Sequence
  Quasi-synthetic sequence derived from human genome
KTNRIARILAGSKKKICTRKPRFMSAWAQVIIASILISVQLTLVVTLII

SEQ ID NO: 41754 - protein, 49 aa, Artificial Sequence
  Quasi-synthetic sequence derived from human genome
IIVYKLRRKSNFRLRGYSTGKTTAILFTITSIFATLWAPRIIMILYHLY

SEQ ID NO: 41755 - protein, 49 aa, Artificial Sequence
  Quasi-synthetic sequence derived from human genome
GVILLALGALLVLQLIRRRRREHGALWLPPGFTRRPRTQSAPHRRRPPL

SEQ ID NO: 41756 - protein, 49 aa, Artificial Sequence
  Quasi-synthetic sequence derived from human genome
KTLKIIGGKFGTSVLSYFNFLRWLLKFNIFSFILNFSFIIIPQFTVAKK

SEQ ID NO: 41757 - protein, 49 aa, Artificial Sequence
  Quasi-synthetic sequence derived from human genome
KIARKPRTPECVKGVVTDLLRRWKHWLLLLGICCPKPHGRVSSRLRLSR

SEQ ID NO: 41758 - protein, 49 aa, Artificial Sequence
  Quasi-synthetic sequence derived from human genome
GPVFWRRLLGLLPGRPGLAALLGRLSDRLGRNRDRQRRRSPWLLLAPLL

SEQ ID NO: 41759 - protein, 49 aa, Artificial Sequence
  Quasi-synthetic sequence derived from human genome
VLMIISLAWLVFYYIQRFRYANARDRNQRRLGDAAKKAISKLQIRTIKK

SEQ ID NO: 41760 - protein, 49 aa, Artificial Sequence
  Quasi-synthetic sequence derived from human genome
WLARTHYKRSMHAIIYLQCCFRRMMAKRELKKLKIEARSVERYKKLHIG

SEQ ID NO: 41761 - protein, 49 aa, Artificial Sequence
  Quasi-synthetic sequence derived from human genome
RSLAVARPFVSQKLRTKAMARRVLAGIWVLSFLLATPVLAYRTVVPWKT

SEQ ID NO: 41762 - protein, 49 aa, Artificial Sequence
  Quasi-synthetic sequence derived from human genome
VKALRAFRVLRPLRLVSGVPSLHIVLNSIMKALVPLLHIALLVLFVIII

SEQ ID NO: 41763 - protein, 49 aa, Artificial Sequence
  Quasi-synthetic sequence derived from human genome
FLVPVLIITACYLTIVCKLQRNRLAKTKKPFKIIVTIIITFFLCWCPYH

SEQ ID NO: 41764 - protein, 49 aa, Artificial Sequence
  Quasi-synthetic sequence derived from human genome
GKTKIFIRSPKTLFYLEEQRRLRLQQLATLIQKIYRGWRCRTHYQLMRK

SEQ ID NO: 41765 - protein, 49 aa, Artificial Sequence
  Quasi-synthetic sequence derived from human genome
SHLPIQLFPKSFFSSKAKVIYLMRNPRDVLVSGYFFWKNMKFIKKPKSW

SEQ ID NO: 41766 - protein, 49 aa, Artificial Sequence
  Quasi-synthetic sequence derived from human genome
GLKKKAFVWARNIGFKVNSKKMLGKYNTPVSYRMAKTLVFSKVKTSLGL

SEQ ID NO: 41767 - protein, 49 aa, Artificial Sequence
  Quasi-synthetic sequence derived from human genome
FRLFRVMRLVKLLSRGEGIRTLLWTFIKSFQALPYVALLIVMLFFIYAV

SEQ ID NO: 41768 - protein, 49 aa, Artificial Sequence
  Quasi-synthetic sequence derived from human genome
SMFRKPYVRRRPSKRRGARAFRCIKPAPVIHPASVIFTVPATTVKIVSL

SEQ ID NO: 41769 - protein, 49 aa, Artificial Sequence
  Quasi-synthetic sequence derived from human genome
IHLFRKPQRSFFGKLLREFRLVAADRRSWKILLFGVINLICTGFLLMWC

SEQ ID NO: 41770 - protein, 49 aa, Artificial Sequence
  Quasi-synthetic sequence derived from human genome
KALPKKGVLGKSPLSALARKKARLSLVIRSPSLLQSGAKKKAQTLRFTI

SEQ ID NO: 41771 - protein, 49 aa, Artificial Sequence
  Quasi-synthetic sequence derived from human genome
VLRLLALIFAIVTTWMFIRSYMSFSMKTIRLPRWLAASPTKEIQVKKYK

SEQ ID NO: 41772 - protein, 49 aa, Artificial Sequence
  Quasi-synthetic sequence derived from human genome
LVLIPKAKPLTLLWAYFCFLLAALGVTAGAHRLWSHRSYRAKLPLRIFL

SEQ ID NO: 41773 - protein, 49 aa, Artificial Sequence
  Quasi-synthetic sequence derived from human genome
RPHLPGKKKIRWDPVRRRFIQSCPIIRIPNRFLRGHRPPPARSGHRCVA

SEQ ID NO: 41774 - protein, 49 aa, Artificial Sequence
  Quasi-synthetic sequence derived from human genome
LVKNWYREHCPAGQPVKVRVSYQKLLKYYVLNALKHRPPKAQKKRYLFR

SEQ ID NO: 41775 - protein, 49 aa, Artificial Sequence
  Quasi-synthetic sequence derived from human genome
LKEAWAAIIIQKHCRGYLVRSLYQLIRMATITMQAYSRGFLARRRYRKM

SEQ ID NO: 41776 - protein, 49 aa, Artificial Sequence
  Quasi-synthetic sequence derived from human genome
FVFFRKLTTIFPLNWKYRKALSLGCQRVTLHKNMFLTYILNSMIIIIHL

SEQ ID NO: 41777 - protein, 49 aa, Artificial Sequence
  Quasi-synthetic sequence derived from human genome
KAKVLSVLKHSLLSFKRRRAMETLKLYFLFSLQLLIKEDYLNKKGNPKK

SEQ ID NO: 41778 - protein, 49 aa, Artificial Sequence
  Quasi-synthetic sequence derived from human genome
LKGPWRPTPRPRVPVPWRTPRFACRWLGYLGLLLLDVIICLLVLVGLIR

SEQ ID NO: 41779 - protein, 49 aa, Artificial Sequence
  Quasi-synthetic sequence derived from human genome
ALLLVVVTWRVCQKSHCFRLGRQLSKALQVNCVVRKLLVQLRRLYWWVE

SEQ ID NO: 41780 - protein, 49 aa, Artificial Sequence
  Quasi-synthetic sequence derived from human genome
RLRLGERGLMEPLLPPKRRLLPRVRLLPLLLALAVGSAFYTIWSGWHRR

SEQ ID NO: 41781 - protein, 49 aa, Artificial Sequence
  Quasi-synthetic sequence derived from human genome
FFKRSICNKRVYRCSRDKNCVMSRKQRNRCQYCRLLKCLQMGMNRKAIR

SEQ ID NO: 41782 - protein, 49 aa, Artificial Sequence
  Quasi-synthetic sequence derived from human genome
NPRSLKHLCRLKIRKCMGRLHLRCPVFMSFLPLPNRLKAYVLYKEYDLY

SEQ ID NO: 41783 - protein, 49 aa, Artificial Sequence
  Quasi-synthetic sequence derived from human genome
KRYLWATVTIQRHWRAYLRRKQDQQRYEMLKSSTLIIQSMFRKWKQRKM

SEQ ID NO: 41784 - protein, 49 aa, Artificial Sequence
  Quasi-synthetic sequence derived from human genome
KVAARMVWRLLHGQVLTRRERRRLLRTCVDFFRLVPFMVFLIVPFMEFL

SEQ ID NO: 41785 - protein, 49 aa, Artificial Sequence
  Quasi-synthetic sequence derived from human genome
MCFLRRPGAPASWIWWRMLRQVLRRGLQSFCHRLGLCVSRHPVFFLTVP

SEQ ID NO: 41786 - protein, 49 aa, Artificial Sequence
  Quasi-synthetic sequence derived from human genome
MANSRFSCTQIWVKMYGYFAGLCRRLQKFWRVTVKGFFVKKKEKKIPSA

SEQ ID NO: 41787 - protein, 49 aa, Artificial Sequence
  Quasi-synthetic sequence derived from human genome
WLSLKTYKWQGLWNIPTYKGKMKRIAFQFTPYSWVRFEWKPASSLRRWL

SEQ ID NO: 41788 - protein, 49 aa, Artificial Sequence
  Quasi-synthetic sequence derived from human genome
RFARHVSPLINVLMANVLLLVPPLTNPIVYCVKTKQIRVRVVAKLCQRK

SEQ ID NO: 41789 - protein, 49 aa, Artificial Sequence
  Quasi-synthetic sequence derived from human genome
KKVVNPLFEKRPKNFGIGQDIQPKRDLTRFVKWPRYIRLQRQRAILYKR

SEQ ID NO: 41790 - protein, 49 aa, Artificial Sequence
  Quasi-synthetic sequence derived from human genome
RILNTNLRQIMVISVLAAAVSLLYFSVVIIRNKYGRLTRDKKFQRYLAR

SEQ ID NO: 41791 - protein, 49 aa, Artificial Sequence
  Quasi-synthetic sequence derived from human genome
FLYTTFGQSAFSQLRLTPGLRKVLFATALGTVALALAAHQLKRRRRRKK

SEQ ID NO: 41792 - protein, 49 aa, Artificial Sequence
  Quasi-synthetic sequence derived from human genome
FRCVRLLRIFKVTRHWTSLSNLVASLLNSMKSIASLLLLLFLFIIIFSL

SEQ ID NO: 41793 - protein, 49 aa, Artificial Sequence
  Quasi-synthetic sequence derived from human genome
GVRQAHGSWFRLSFVYNHYLFFACILVVLLAIFLYLLRLRRIHHRQTRA

SEQ ID NO: 41794 - protein, 49 aa, Artificial Sequence
  Quasi-synthetic sequence derived from human genome
KSKIFFLFRLCKKLPFNMMSWLNFSIRTEIRNLSVFLALPCKFTSQFRS

SEQ ID NO: 41795 - protein, 49 aa, Artificial Sequence
  Quasi-synthetic sequence derived from human genome
KKDMRNNYLKSRRFKMDLLSLLPLDFLYLKVGVNPLLRLPRCLKYMAFF

SEQ ID NO: 41796 - protein, 49 aa, Artificial Sequence
  Quasi-synthetic sequence derived from human genome
KLYQFLHLRKAAITIQSSYRRLMVKKKLQEMQRAAVLIQATFRMYRTYI

SEQ ID NO: 41797 - protein, 49 aa, Artificial Sequence
  Quasi-synthetic sequence derived from human genome
FRLLWIDTKIAARMLWRILNGHSLTRRERRQFLRICADLFRLVPFLVFV

SEQ ID NO: 41798 - protein, 49 aa, Artificial Sequence
  Quasi-synthetic sequence derived from human genome
SKVCRGYLVKMGGKIKSWKKRWFVFDRLKRTLSYYVDKHETKLKGVIYF

SEQ ID NO: 41799 - protein, 49 aa, Artificial Sequence
  Quasi-synthetic sequence derived from human genome
HQLLLILRGQTRHQVRKGVAVRARPWRKNLQEVFGKRWLLGLLVPMFNV

SEQ ID NO: 41800 - protein, 49 aa, Artificial Sequence
  Quasi-synthetic sequence derived from human genome
KLKSKYLDMRRQIKMKNKHIFFTKESEKPFFKKSKILSKVEKFLTWVNK

SEQ ID NO: 41801 - protein, 49 aa, Artificial Sequence
  Quasi-synthetic sequence derived from human genome
FTLVISLGIFVFFRKLTTIFPLNWKYRKALSLGCQRVTLHKNMFLTYIL

SEQ ID NO: 41802 - protein, 49 aa, Artificial Sequence
  Quasi-synthetic sequence derived from human genome
ISYHTQHKGRLKHRGSSLHPFRKGLQEKDKVWLLREQKRKKKLRKLLKR

SEQ ID NO: 41803 - protein, 49 aa, Artificial Sequence
  Quasi-synthetic sequence derived from human genome
RLVRMKVFHLSLSQSVVLRHHWILPFVQALKARMTSFHRFFFTANQVKI

SEQ ID NO: 41804 - protein, 49 aa, Artificial Sequence
  Quasi-synthetic sequence derived from human genome
FKIAYRKVGQCRRFQQLKKKNGSFKRKGIERWHRAVSTNLLKQNVLVPK

SEQ ID NO: 41805 - protein, 49 aa, Artificial Sequence
  Quasi-synthetic sequence derived from human genome
IAGVDIVLLCVMNLIILVNLIHLFIFRKSNFIFDKLHKVGIKTRRQWRR

SEQ ID NO: 41806 - protein, 49 aa, Artificial Sequence
  Quasi-synthetic sequence derived from human genome
REKKRILFLYNDLLKKRAAFTKLRRAAILRRERQQKAPVFTEPQFLPLK

SEQ ID NO: 41807 - protein, 49 aa, Artificial Sequence
  Quasi-synthetic sequence derived from human genome
FLAFKNDISFWKKKKSMIGMSTKLWKVKKALKMTIFWRGLMPEFQFGTY

SEQ ID NO: 41808 - protein, 49 aa, Artificial Sequence
  Quasi-synthetic sequence derived from human genome
FRLVQASGQKAPRPAARRKARRLLKTVLMILLAFLVCWGPLFGLLLADV

SEQ ID NO: 41809 - protein, 49 aa, Artificial Sequence
  Quasi-synthetic sequence derived from human genome
FAQVVFKAKVKRRPEMSRGLLAVRGAFVGASLLFLLVNVLCAVLSHRRR

SEQ ID NO: 41810 - protein, 49 aa, Artificial Sequence
  Quasi-synthetic sequence derived from human genome
IFQGCLYLIYNLLQAVFFVLFVLSVHYLWKKWKKHQKKLKKQASLEKPG

SEQ ID NO: 41811 - protein, 49 aa, Artificial Sequence
  Quasi-synthetic sequence derived from human genome
FKKTHRILRRLFNLCKRCHRQPRFRLPKERSLSYWWNRIQSLLYCGEST

SEQ ID NO: 41812 - protein, 49 aa, Artificial Sequence
  Quasi-synthetic sequence derived from human genome
GFAGLLAILLVVAVFCILWNWNKRKKRQVPYLRVTVMPLLTLPQTRQRA

SEQ ID NO: 41813 - protein, 49 aa, Artificial Sequence
  Quasi-synthetic sequence derived from human genome
SIFLYLKWRVKKVVLVLLLVTSVFLFLNIALINIHINASINGYRRNKTC

SEQ ID NO: 41814 - protein, 49 aa, Artificial Sequence
  Quasi-synthetic sequence derived from human genome
KRCRPSVYSLSYIKRGKTRNYLYPIWSPYAYYLYCYKYRITLREKMLPR

SEQ ID NO: 41815 - protein, 49 aa, Artificial Sequence
  Quasi-synthetic sequence derived from human genome
FVFAQMLSSVSTWLAIILLIFISLFPEILLIVLKNVRRRSARRNLSCRR

SEQ ID NO: 41816 - protein, 49 aa, Artificial Sequence
  Quasi-synthetic sequence derived from human genome
RRLPARPGTAGTTSTRARRKPRSLALLRTLSVVLLAFVACWGPLFLLLL

SEQ ID NO: 41817 - protein, 49 aa, Artificial Sequence
  Quasi-synthetic sequence derived from human genome
ARVFMPLQAQVKAKASKPLQMQIKAPPRLRRAARVLMPLQAQVRAPRLL

SEQ ID NO: 41818 - protein, 49 aa, Artificial Sequence
  Quasi-synthetic sequence derived from human genome
RYKYKLMRQIRMCKDLKHLIYYRFNTGPVGKGPGCGFWAAGWRVWLFFM

SEQ ID NO: 41819 - protein, 49 aa, Artificial Sequence
  Quasi-synthetic sequence derived from human genome
MRRIRYEFKAKNIKKKKVSIMVSVDGVKVILKKKKKKKEWTWDESKMLV

SEQ ID NO: 41820 - protein, 49 aa, Artificial Sequence
  Quasi-synthetic sequence derived from human genome
RMVIKRVVLSGHPFKIFTKMAVVRYMFFNREDVLWFKPVELRTKWGRRG

SEQ ID NO: 41821 - protein, 49 aa, Artificial Sequence
  Quasi-synthetic sequence derived from human genome
MNRLRNAKIYVERAVKQKKIFTIQGCYPVIRCLLRRRGWVEKKMVHRSG

SEQ ID NO: 41822 - protein, 49 aa, Artificial Sequence
  Quasi-synthetic sequence derived from human genome
TIVKSYYWRVTMAPHPKDIIWKHLSVRRFFWWARFIAINTFLFFLFFFL

SEQ ID NO: 41823 - protein, 49 aa, Artificial Sequence
  Quasi-synthetic sequence derived from human genome
KLKNAYVLYYLAIVGHSLSIFTLVISLGIFVFFRKLTTIFPLNWKYRKA

SEQ ID NO: 41824 - protein, 49 aa, Artificial Sequence
  Quasi-synthetic sequence derived from human genome
RAVRVLRPLKLVSGIPSLQIVLKSIMKAMVPLLQIGLLLFFAILMFAII

SEQ ID NO: 41825 - protein, 49 aa, Artificial Sequence
  Quasi-synthetic sequence derived from human genome
VMIPQNVHRILINLMKYLQKWKRYRPLWKLDKAIVMEKFAAKKPPCVAY

SEQ ID NO: 41826 - protein, 49 aa, Artificial Sequence
  Quasi-synthetic sequence derived from human genome
FFKGGRCWRFRGPKPVWGLPQLCRAGGLPRHPDAALFFPPLRRLILFKG

SEQ ID NO: 41827 - protein, 49 aa, Artificial Sequence
  Quasi-synthetic sequence derived from human genome
QVVSAQKKLPVRRPPLPGRRLPLPGRRPPQRPIGKAKPKKQSKKKVPFW

SEQ ID NO: 41828 - protein, 49 aa, Artificial Sequence
  Quasi-synthetic sequence derived from human genome
IVMLCGLLKMWEDLRLRVHGPFFPRILRRRKGKREFGKTITHIVAKMMT

SEQ ID NO: 41829 - protein, 49 aa, Artificial Sequence
  Quasi-synthetic sequence derived from human genome
LPRKKLKHIRQGTNKGLIKKKLKNMLAAVVTKKKTHKYNCKSSGWISKC

SEQ ID NO: 41830 - protein, 49 aa, Artificial Sequence
  Quasi-synthetic sequence derived from human genome
YRRKPTCKKIMTVLTVGIFWPVLSLCYLIAPKSQFGRIIHTPFMKFIIH

SEQ ID NO: 41831 - protein, 49 aa, Artificial Sequence
  Quasi-synthetic sequence derived from human genome
RSHIPLLSELWFQLCRYMNPRARKNCSQIALFRKYRFHFFCSMRCRAWV

SEQ ID NO: 41832 - protein, 49 aa, Artificial Sequence
  Quasi-synthetic sequence derived from human genome
LTRPFSGRRLPVRAWADVRRESRLLQLLGRLPLFGLGRLVTRKSWLWQH

SEQ ID NO: 41833 - protein, 49 aa, Artificial Sequence
  Quasi-synthetic sequence derived from human genome
VWKNWLGVKRQPLWTLVLILWPVIIFIILAITRTKFPPTAKPTCYLAPR

SEQ ID NO: 41834 - protein, 49 aa, Artificial Sequence
  Quasi-synthetic sequence derived from human genome
RRALLRAVFVLRQGLACLQRLHVAWFYIHGVFYHLAKRLTGITYQALRP

SEQ ID NO: 41835 - protein, 49 aa, Artificial Sequence
  Quasi-synthetic sequence derived from human genome
RQVALAVSKFLLAFLVPLAIIASSHAAVSLRLQHRGRRRPGRFVRLVAA

SEQ ID NO: 41836 - protein, 49 aa, Artificial Sequence
  Quasi-synthetic sequence derived from human genome
RTHHTGLLSVLAMFFLLVLILSSVFLFRLFKRRQGRIFPEGKMWKLTFS

SEQ ID NO: 41837 - protein, 49 aa, Artificial Sequence
  Quasi-synthetic sequence derived from human genome
FTTTQGKASQCGKYLKVFYKFINLNRYKIRHTRKKPFKCKNCVKSFCMF

SEQ ID NO: 41838 - protein, 49 aa, Artificial Sequence
  Quasi-synthetic sequence derived from human genome
IMKEIRKPGRKYERIFTLLKHVQGSLQTRLIFLQNVIKEASRFKKRMLI

SEQ ID NO: 41839 - protein, 49 aa, Artificial Sequence
  Quasi-synthetic sequence derived from human genome
VSRPTEKTIFLLFMQSIATISLFLNILEIFHLGFKKIKRGLWGKYKLKK

SEQ ID NO: 41840 - protein, 49 aa, Artificial Sequence
  Quasi-synthetic sequence derived from human genome
LKIANFSNLIFLHLKRRVKSVVLVILLGPLLFLVCHLFVINMNQIIWTK

SEQ ID NO: 41841 - protein, 49 aa, Artificial Sequence
  Quasi-synthetic sequence derived from human genome
RYYTALYRKMLDPGLMTCSKQAMFLNLVYKSLKADIVLRRVKAFVKRLL

SEQ ID NO: 41842 - protein, 49 aa, Artificial Sequence
  Quasi-synthetic sequence derived from human genome
LLRRKLTAPVAFSVIAMFNVMKFSIAILPFSIKAMAEANVSLRRMKKIL

SEQ ID NO: 41843 - protein, 49 aa, Artificial Sequence
  Quasi-synthetic sequence derived from human genome
RAFILKSKGIKQKQIIPKNLLDSKSLKLIISMTLHDRTTKSLLHLHKKK

SEQ ID NO: 41844 - protein, 49 aa, Artificial Sequence
  Quasi-synthetic sequence derived from human genome
SYRIIYNLFHKTVPEFKYRILQILRVQNQFLWEKYKRKKEYMNRKMFGR

SEQ ID NO: 41845 - protein, 49 aa, Artificial Sequence
  Quasi-synthetic sequence derived from human genome
LKKLNKNKKLVKKLAKKYDAFLASESLIKQIPRILGPGLNKAGKFPSLL

SEQ ID NO: 41846 - protein, 49 aa, Artificial Sequence
  Quasi-synthetic sequence derived from human genome
VLVRKSFKVHVPISIIPGDFPLSSEVRKKLEQHIRKRLIQRRWGLPRRI

SEQ ID NO: 41847 - protein, 49 aa, Artificial Sequence
  Quasi-synthetic sequence derived from human genome
TGLNMRVIQVWFQNRRSKERRMKQLSALGARRHAFFRSPRRMRPLVDRL

SEQ ID NO: 41848 - protein, 49 aa, Artificial Sequence
  Quasi-synthetic sequence derived from human genome
LRQKSAALIIQKYIRAREAGKHERIKYIEFKKSTVILQALVRGWLVRKR

SEQ ID NO: 41849 - protein, 49 aa, Artificial Sequence
  Quasi-synthetic sequence derived from human genome
WVLGKTKVFLKYYHVEQLNLLLREVIGRVVVLQAYTKGWLGARRYKRVR

SEQ ID NO: 41850 - protein, 49 aa, Artificial Sequence
  Quasi-synthetic sequence derived from human genome
RLLKFSREKKAAKTLGIVVGCFVLCWLPFFLVMPIGTYILKYDVLFWRK

SEQ ID NO: 41851 - protein, 49 aa, Artificial Sequence
  Quasi-synthetic sequence derived from human genome
CAISLCARVRKLRSAGRCGKFHQVRRVMTILFLTMVISYFGCMKAAPMK

SEQ ID NO: 41852 - protein, 49 aa, Artificial Sequence
  Quasi-synthetic sequence derived from human genome
RVFRGRFQGRAAVIKHRFPKGYRHPALEARLGRRRTVQEARALLRCRRA

SEQ ID NO: 41853 - protein, 49 aa, Artificial Sequence
  Quasi-synthetic sequence derived from human genome
IYLRHVPLRKVHLFTLIQLTCLVLLWVIKASPAAIVFPMMVLALVFVRK

SEQ ID NO: 41854 - protein, 49 aa, Artificial Sequence
  Quasi-synthetic sequence derived from human genome
IRKLIKDGLIIRKPVTVHSRARCRKNTLARRKGRHMGIGKRKGTANARM

SEQ ID NO: 41855 - protein, 49 aa, Artificial Sequence
  Quasi-synthetic sequence derived from human genome
FLRSHLKKKSIVFFSSCKEVQYLYRVFCRLRPGVSILALHGRQQQMRRM

SEQ ID NO: 41856 - protein, 49 aa, Artificial Sequence
  Quasi-synthetic sequence derived from human genome
TAQSKVFQCGKYLKVFYKFLNSNRHTIRHTGKKCFKCKKCVKSFCIRLH

SEQ ID NO: 41857 - protein, 49 aa, Artificial Sequence
  Quasi-synthetic sequence derived from human genome
RKVPGFVPASPWGLRLPQKFLFLLFLSGLVTLCFGALFLLPHSSRLKRL

SEQ ID NO: 41858 - protein, 49 aa, Artificial Sequence
  Quasi-synthetic sequence derived from human genome
RWARPFYLAFVFCLALGLLQAIKLYLRRQRLLRDLRPFPAPPTHWFLGH

SEQ ID NO: 41859 - protein, 49 aa, Artificial Sequence
  Quasi-synthetic sequence derived from human genome
WKIKLRNAIHLSSLTVTTLANLIPFTLSLICFLLLICSLCKHLKKMRLH

SEQ ID NO: 41860 - protein, 49 aa, Artificial Sequence
  Quasi-synthetic sequence derived from human genome
RIKARKRKQLHFFDSRLKDLKLGTNIKDLCAALWILMKNPVLICLALSK

SEQ ID NO: 41861 - protein, 49 aa, Artificial Sequence
  Quasi-synthetic sequence derived from human genome
ALFYVSSTINPILYNLVSANFRHIFLATLACLCPVWRRRRKRPAFSRKA

SEQ ID NO: 41862 - protein, 49 aa, Artificial Sequence
  Quasi-synthetic sequence derived from human genome
YFPQILRFLRPWYFSRSHLNYHQKAPARWEWLYSIYRKGTKAQRRNVLR

SEQ ID NO: 41863 - protein, 49 aa, Artificial Sequence
  Quasi-synthetic sequence derived from human genome
FVVVILSIVGMFLAEMIEKYFVSPTLFRVIRLARIGRILRLIKGAKGIR

SEQ ID NO: 41864 - protein, 49 aa, Artificial Sequence
  Quasi-synthetic sequence derived from human genome
KVILAIRRAKNLRRLLYVSCNPRAAMGNFVDLCRAPSNRVKGIPFRPVK

SEQ ID NO: 41865 - protein, 49 aa, Artificial Sequence
  Quasi-synthetic sequence derived from human genome
VVLFSTWRRKKKSRMTFFVTQLAITGCAALRLYLRPGVPQHRQIPCHRL

SEQ ID NO: 41866 - protein, 49 aa, Artificial Sequence
  Quasi-synthetic sequence derived from human genome
LIQANWRGYWLRQKLISQMMAAKAIQEAWRRFNKRHILHSSKSLVKKTR

SEQ ID NO: 41867 - protein, 49 aa, Artificial Sequence
  Quasi-synthetic sequence derived from human genome
IVTANPWNTIALLCGAFLALFKAAEFAKLSIKWMIKIRKRYLKRRGQAT

SEQ ID NO: 41868 - protein, 49 aa, Artificial Sequence
  Quasi-synthetic sequence derived from human genome
PSRLSLKLLRAFMWSLVFSVALVAAAVYGCIALTHVLCRPRRGCCGRRR

SEQ ID NO: 41869 - protein, 49 aa, Artificial Sequence
  Quasi-synthetic sequence derived from human genome
PKWFVKAGGVAMYAVSWCFMFSIWRFAWRKSIKKYHAWRSRRSEERQLK

SEQ ID NO: 41870 - protein, 49 aa, Artificial Sequence
  Quasi-synthetic sequence derived from human genome
ARVVAAAGRALRGLSYRSLRRRVRRLRRLTAREAATAVAALLWAAVTRA

SEQ ID NO: 41871 - protein, 49 aa, Artificial Sequence
  Quasi-synthetic sequence derived from human genome
CFNMGQIVLAKKMLRKALKLLNRIFPYNLISLFLHIHVEKNRHFHYVNR

SEQ ID NO: 41872 - protein, 49 aa, Artificial Sequence
  Quasi-synthetic sequence derived from human genome
VKALRAFRVLRPLRLVSGVPSLQVVLNSIFKAMLPLFHIALLVLFMVII

SEQ ID NO: 41873 - protein, 49 aa, Artificial Sequence
  Quasi-synthetic sequence derived from human genome
LYSRAVRNLKKKLLPWQRRGLLRAQGLRGWKARRATTGTQTLLSSGTRL

SEQ ID NO: 41874 - protein, 49 aa, Artificial Sequence
  Quasi-synthetic sequence derived from human genome
KELLIYLRVATWNQILDPWVYILFRRAVLRRLQPRLSTRPRRSLTLWPS

SEQ ID NO: 41875 - protein, 49 aa, Artificial Sequence
  Quasi-synthetic sequence derived from human genome
VRKRLLHRQSTQLLAQRLSRTCFRQWRQQLAARRQEQRATVRALWFWAF

SEQ ID NO: 41876 - protein, 49 aa, Artificial Sequence
  Quasi-synthetic sequence derived from human genome
HFRKERIEGLRKRRRLLSIIVVLVVTFALCWMPYHLVKTLYMLGSLLHW

SEQ ID NO: 41877 - protein, 49 aa, Artificial Sequence
  Quasi-synthetic sequence derived from human genome
NFVYKLFSLQDLLLLVRCSVQRIETRPRSKKRKKIRRQFPVYVLPKVEY

SEQ ID NO: 41878 - protein, 49 aa, Artificial Sequence
  Quasi-synthetic sequence derived from human genome
RMMYFSQYFNIVALQLFYLSASINPILYNLISKKYRAAAFKLLLARKSR

SEQ ID NO: 41879 - protein, 49 aa, Artificial Sequence
  Quasi-synthetic sequence derived from human genome
LKSNWLGLRFLRALRLLELPQILQILRAIKTSNSVKFSKLLSIILSTWF

SEQ ID NO: 41880 - protein, 49 aa, Artificial Sequence
  Quasi-synthetic sequence derived from human genome
IKKQIQEQHQAAIIIQKHCKAFKIRKHYLHLRATVVSIQRRYRKLTAVR

SEQ ID NO: 41881 - protein, 49 aa, Artificial Sequence
  Quasi-synthetic sequence derived from human genome
KPRKASSSLAGAACAPLFALLSRGRRRRMHVLRRRWDLGSLCRALLTRG

SEQ ID NO: 41882 - protein, 49 aa, Artificial Sequence
  Quasi-synthetic sequence derived from human genome
ILDFIVVSGALVAFAFSGSKGKDINTIKSLRVLRVLRPLKTIKRLPKLK

SEQ ID NO: 41883 - protein, 49 aa, Artificial Sequence
  Quasi-synthetic sequence derived from human genome
FRKKVPPIIGITTQFHAWWHILTGLGSYLHILFSLYTRTLYLRYRPKVK

SEQ ID NO: 41884 - protein, 49 aa, Artificial Sequence
  Quasi-synthetic sequence derived from human genome
WRRSGKYVYKPVMNQTCCPQYTIRCRPLQFQPSKSHKKVLKKMLKFLAK

SEQ ID NO: 41885 - protein, 49 aa, Artificial Sequence
  Quasi-synthetic sequence derived from human genome
RRWRKLYRANGHLFQAKRFNRRAYCGQCSERIWGLARQGYRCINCKLLV

SEQ ID NO: 41886 - protein, 49 aa, Artificial Sequence
  Quasi-synthetic sequence derived from human genome
VLVKDQKKMIIWFPDMVKDVIGSYKKWCRSILRRTSLILARVFGLHLRL

SEQ ID NO: 41887 - protein, 49 aa, Artificial Sequence
  Quasi-synthetic sequence derived from human genome
LKVQTVIILGKVILWILHLLLECYIQYHHSKIRNRGYNLIYRSTRHLKR

SEQ ID NO: 41888 - protein, 49 aa, Artificial Sequence
  Quasi-synthetic sequence derived from human genome
AQRWLVGFVLYTFLMGFLLPVGAICLCYVLIIAKMRMVALKAGWQQRKR

SEQ ID NO: 41889 - protein, 49 aa, Artificial Sequence
  Quasi-synthetic sequence derived from human genome
YFGVRALHRLHQFQQLLWVLGLLVGLLLLLLGLGACYTWRRRRVCKQSM

SEQ ID NO: 41890 - protein, 49 aa, Artificial Sequence
  Quasi-synthetic sequence derived from human genome
KLKWFYYSTRYVYLLVRHMYRIYGLQLLMEDTWKRIRFPDILRVFWLTR

SEQ ID NO: 41891 - protein, 49 aa, Artificial Sequence
  Quasi-synthetic sequence derived from human genome
RRQGVVRLRLRDLQEAFQRKGSVPLGLATVLQDLLRKRLRRCIVCIRTR

SEQ ID NO: 41892 - protein, 49 aa, Artificial Sequence
  Quasi-synthetic sequence derived from human genome
LCYVLIIAKMRMVALKAGWQQRKRSERKITLMVMMVVMVFVICWMPFYV

SEQ ID NO: 41893 - protein, 49 aa, Artificial Sequence
  Quasi-synthetic sequence derived from human genome
LKRLVKLHIKRHYHKKFWKLGAVIFFFIIVLVLMQREVSVQYSKEESRM

SEQ ID NO: 41894 - protein, 49 aa, Artificial Sequence
  Quasi-synthetic sequence derived from human genome
KHSLAFVVRIERIDGVSLLVQRTIARLRLKKIFSGVFVKVTPQNLKMLR

SEQ ID NO: 41895 - protein, 49 aa, Artificial Sequence
  Quasi-synthetic sequence derived from human genome
VQMRLKKHRWYKKILKSRDPIIFSVGWRRFQTIPLYYIEDHNGRQRLLK

SEQ ID NO: 41896 - protein, 49 aa, Artificial Sequence
  Quasi-synthetic sequence derived from human genome
RVPKKLKKPAKPLLSKIKLRNHCKRLEQKNASRKLEMGNLVLKEPKVVL

SEQ ID NO: 41897 - protein, 49 aa, Artificial Sequence
  Quasi-synthetic sequence derived from human genome
VFLFAFVVPILIITVCYGLMLLRLRSVRLLSGSKEKDRSLRRITRMVLV

SEQ ID NO: 41898 - protein, 49 aa, Artificial Sequence
  Quasi-synthetic sequence derived from human genome
RKKSKGLATRLSRRRVSCRELGRPDCDGWLLLRKAPGGFMGPRWRRRWF

SEQ ID NO: 41899 - protein, 49 aa, Artificial Sequence
  Quasi-synthetic sequence derived from human genome
FSPPRRMLPPPPMWRRSPPRMRRRSRSPRRRSPVRRRSRSPGRRRHRSR

SEQ ID NO: 41900 - protein, 49 aa, Artificial Sequence
  Quasi-synthetic sequence derived from human genome
PVAGVILLALGALLVLQLIRRRRREHGALWLPPGFTRRPRTQSAPHRRR

SEQ ID NO: 41901 - protein, 49 aa, Artificial Sequence
  Quasi-synthetic sequence derived from human genome
RIRRLLRPFFLLQNSSMMKKTLKCIRWSLPEMASVGLLLAIHLCLFTMF

SEQ ID NO: 41902 - protein, 49 aa, Artificial Sequence
  Quasi-synthetic sequence derived from human genome
LPKPRMRGLLARRLRNHMAVAFVLSLGVAALYKFRVADQRKKAYADFYR

SEQ ID NO: 41903 - protein, 49 aa, Artificial Sequence
  Quasi-synthetic sequence derived from human genome
KKHLKRVAAPKHWMLDKLTGVFAPRPSTGPHKLRECLPLIIFLRNRLKY

SEQ ID NO: 41904 - protein, 49 aa, Artificial Sequence
  Quasi-synthetic sequence derived from human genome
LLVFTALAILIMRLKMFLTPHMCVMASLICSRQLFGWLFRRVRFEKVIF

SEQ ID NO: 41905 - protein, 49 aa, Artificial Sequence
  Quasi-synthetic sequence derived from human genome
IKFTWKRLRSHSRQYVSGLHMNRERKAAKQLGFIMAAFILCWIPYFIFF

SEQ ID NO: 41906 - protein, 49 aa, Artificial Sequence
  Quasi-synthetic sequence derived from human genome
KYLLKQALATGMRRGLLARPLNSKARGATGSFKLVPKHKKKIQPRKMAP

SEQ ID NO: 41907 - protein, 49 aa, Artificial Sequence
  Quasi-synthetic sequence derived from human genome
LGRVAQVLRLMRIFRILKLARHSTGLRSLGATLKYSYKEVGLLLLYLSV

SEQ ID NO: 41908 - protein, 49 aa, Artificial Sequence
  Quasi-synthetic sequence derived from human genome
WWKFTVNIISVYKQGTSRIRRGDQSLWIRSRDIACKCPKIKPLKKYLLL

SEQ ID NO: 41909 - protein, 49 aa, Artificial Sequence
  Quasi-synthetic sequence derived from human genome
KPSEGVFKVIFWLGYFNSCVNPLIYPCSSREFKRAFLRLLRCQCRRRRR

SEQ ID NO: 41910 - protein, 49 aa, Artificial Sequence
  Quasi-synthetic sequence derived from human genome
SLLLVLGLLLTEIVRSWSLALTWALNYRTGVRLRGAILTMAFKKILKLK

SEQ ID NO: 41911 - protein, 49 aa, Artificial Sequence
  Quasi-synthetic sequence derived from human genome
LQIIQRERRRKELFRKKNKAAAVIQRAWRSYQLRKHLSHLRHMKQLGAG

SEQ ID NO: 41912 - protein, 49 aa, Artificial Sequence
  Quasi-synthetic sequence derived from human genome
KATKRCKKLEAVYKEFELQKVCYLPLNTFLLKPIQRLLHYRLLLRRLCG

SEQ ID NO: 41913 - protein, 49 aa, Artificial Sequence
  Quasi-synthetic sequence derived from human genome
KWKLKQKKKLERKKLIKDMKAKIRVDTIAKRRAELILERDKKRRENVVR

SEQ ID NO: 41914 - protein, 49 aa, Artificial Sequence
  Quasi-synthetic sequence derived from human genome
YKKTKPILRATKLKAEAKKTAIGIKEVGLVLAAILALLLAFYAFFYLRL

SEQ ID NO: 41915 - protein, 49 aa, Artificial Sequence
  Quasi-synthetic sequence derived from human genome
KIISVFYTVVTPLLNPVIYSLRNKDFKEAVRKVMRRKCGILWSTSKRKF

SEQ ID NO: 41916 - protein, 49 aa, Artificial Sequence
  Quasi-synthetic sequence derived from human genome
TAIFLLIFQSILGVIINSFMCGAILAKISRPKKRAKTITFSKNAVISKR

SEQ ID NO: 41917 - protein, 49 aa, Artificial Sequence
  Quasi-synthetic sequence derived from human genome
MRLTRKRLCSFLIALYCLFSLYAAYHVFFGRRRQAPAGSPRGLRKGAAP

SEQ ID NO: 41918 - protein, 49 aa, Artificial Sequence
  Quasi-synthetic sequence derived from human genome
RKHVRKNYMKFKAKFSLIQFHRIIESAILSFTSLIKHLNLHKISKSVTT

SEQ ID NO: 41919 - protein, 49 aa, Artificial Sequence
  Quasi-synthetic sequence derived from human genome
KLVSPKWKNFKGLKLQWRDKIRLNNAIWRAWYMQYLEKRKNPVCHFVTP

SEQ ID NO: 41920 - protein, 49 aa, Artificial Sequence
  Quasi-synthetic sequence derived from human genome
KKTFIQGGQVSLVRHKDVRRIRSLQRSVQVLRAIVVMYVICWLPYHARR

SEQ ID NO: 41921 - protein, 49 aa, Artificial Sequence
  Quasi-synthetic sequence derived from human genome
VNKCGHTGRCWIYNKTKMAFLLVGICFLCKLCTIIFTTIAFFIYKRRLN

SEQ ID NO: 41922 - protein, 49 aa, Artificial Sequence
  Quasi-synthetic sequence derived from human genome
RAKKKKKKKKKLKDVLNENLQRKREGLHSLAFKSYKPEIQNKLLIIKKK

SEQ ID NO: 41923 - protein, 49 aa, Artificial Sequence
  Quasi-synthetic sequence derived from human genome
MRRPGAPASWIWWRMLRQVLRRGLQSFCHRLGLCVSRHPVFFLTVPAVL

SEQ ID NO: 41924 - protein, 49 aa, Artificial Sequence
  Quasi-synthetic sequence derived from human genome
LLVLLIVKMAGRCKSGFDPRHGSHNIKKKAWYLIAMLLKLAFCLALCAK

SEQ ID NO: 41925 - protein, 49 aa, Artificial Sequence
  Quasi-synthetic sequence derived from human genome
VLMARRLLKPAYGTSGGLPRAKRKSVRTIAVVLAVFALCFLPFHVTRTL

SEQ ID NO: 41926 - protein, 49 aa, Artificial Sequence
  Quasi-synthetic sequence derived from human genome
QRRKESKRTNKWQKMLADWTKYRSTKKLSQRVYKVIPLAVRGRAWSLLL

SEQ ID NO: 41927 - protein, 49 aa, Artificial Sequence
  Quasi-synthetic sequence derived from human genome
ILPFYLEVGLSGLSSKAARDVLGFLRVVRFVRILRIFKLTRHFVGLRVL

SEQ ID NO: 41928 - protein, 49 aa, Artificial Sequence
  Quasi-synthetic sequence derived from human genome
FTRLPIRMAKGLGNISAKYRWFAVFYLIIFFFLIPLTVFGLSLAGWRVL

SEQ ID NO: 41929 - protein, 49 aa, Artificial Sequence
  Quasi-synthetic sequence derived from human genome
VGRRRKHQSWWQALDGKLRGDLISRGLEKMLWARKRKQSILKKTCLPLR

SEQ ID NO: 41930 - protein, 49 aa, Artificial Sequence
  Quasi-synthetic sequence derived from human genome
MAHPFLLLILLCMSLLLFQVIRLYQRRRWMIRALHLFPAPPAHWFYGHK

SEQ ID NO: 41931 - protein, 49 aa, Artificial Sequence
  Quasi-synthetic sequence derived from human genome
VKALRAFRVLRPLRLVSGVPSLQVVLNSIIKAMVPLLHIALLVLFVIII

SEQ ID NO: 41932 - protein, 49 aa, Artificial Sequence
  Quasi-synthetic sequence derived from human genome
QRRMFHATVATQTQFFHVKVLNINLKRKFIKKRIIIISNYSKRNSLLEV

SEQ ID NO: 41933 - protein, 49 aa, Artificial Sequence
  Quasi-synthetic sequence derived from human genome
LLQQMRYPIWLITPQTYLIIWVITNCVSTMLLLWTFLLQRRFVKKRGKT

SEQ ID NO: 41934 - protein, 49 aa, Artificial Sequence
  Quasi-synthetic sequence derived from human genome
LLLLGLVALSECIMYKVPLIRKKSLRRTLSERGLLKDFLKKHNLNPARK

SEQ ID NO: 41935 - protein, 49 aa, Artificial Sequence
  Quasi-synthetic sequence derived from human genome
AIIHRLRRRGRSGLQPRVGKSTAILLGITTLFTLLWAPRVFVMLYHMYV

SEQ ID NO: 41936 - protein, 49 aa, Artificial Sequence
  Quasi-synthetic sequence derived from human genome
LRPYSIQCALFLLLLLLGTIATIVFFCCWHRKLQKGRHPMKSVFSGRSR

SEQ ID NO: 41937 - protein, 49 aa, Artificial Sequence
  Quasi-synthetic sequence derived from human genome
LTKRVKNAAANVLRETWLIYKNTKLVKKIDHAKVRKHQRKFLQAIHQLR

SEQ ID NO: 41938 - protein, 49 aa, Artificial Sequence
  Quasi-synthetic sequence derived from human genome
AARKRASPTGGIKKPHRYKPGTLALREIRKYQKSTQLLLRKLPFQRLVR

SEQ ID NO: 41939 - protein, 49 aa, Artificial Sequence
  Quasi-synthetic sequence derived from human genome
MAFLIMVVVYLRIYVYVKRKTNVLSPHTSGSISRRRTPMKLMKTVMTVL

SEQ ID NO: 41940 - protein, 49 aa, Artificial Sequence
  Quasi-synthetic sequence derived from human genome
ILMLARRKERLPLYLRLLQRMEHSKKYPGFLLNNFHNLLRFWQQHYLHK

SEQ ID NO: 41941 - protein, 49 aa, Artificial Sequence
  Quasi-synthetic sequence derived from human genome
KTRLSRTPGNRIVYLYTKKVGKAPKSACGVCPGRLRGVRAVRPKVLMRL

SEQ ID NO: 41942 - protein, 49 aa, Artificial Sequence
  Quasi-synthetic sequence derived from human genome
RPSASRGHRKRSRRVLYPRVVRRQLPVEEPNPAKRLLFLLLTIVFCQIL

SEQ ID NO: 41943 - protein, 49 aa, Artificial Sequence
  Quasi-synthetic sequence derived from human genome
YKLKLRPRIRPRRDHRPEKQPSRIPRPLAYVFLGPARQPPKDRLLRAVL

SEQ ID NO: 41944 - protein, 49 aa, Artificial Sequence
  Quasi-synthetic sequence derived from human genome
MPSVRSLLRLLAAAAACGAFAFLGYCIYLNRKRRGDPAFKRRLRDKRRA

SEQ ID NO: 41945 - protein, 49 aa, Artificial Sequence
  Quasi-synthetic sequence derived from human genome
TFKTCKEYLRPLKKFLRKLHLPRDLPQKKKLKYMKQSLVVLGDHINTFL

SEQ ID NO: 41946 - protein, 49 aa, Artificial Sequence
  Quasi-synthetic sequence derived from human genome
LGLRLCRPYRLAAGVKFRVLRHEAGRPLRLLMQINPLPYSRVVHTYRLP

SEQ ID NO: 41947 - protein, 49 aa, Artificial Sequence
  Quasi-synthetic sequence derived from human genome
LSRKASAVNMEKFKKFAARKKWKQSVRLISLCQRLSRSFLSRSNMSVAR

SEQ ID NO: 41948 - protein, 49 aa, Artificial Sequence
  Quasi-synthetic sequence derived from human genome
KFKNSLVVSFLSYCDYYRPRFFLLENVRNFVSFKRSMVLKLTLRCLVRM

SEQ ID NO: 41949 - protein, 49 aa, Artificial Sequence
  Quasi-synthetic sequence derived from human genome
KEENSAIIIQSWYRMHKELRKYIYIRSCVVIIQKRFRCFQAQKLYKRRK

SEQ ID NO: 41950 - protein, 49 aa, Artificial Sequence
  Quasi-synthetic sequence derived from human genome
RSLQKVRRVHFANARNARSLLSMLKDISAQIIQRAWLSHTNKMIFRLLK

SEQ ID NO: 41951 - protein, 49 aa, Artificial Sequence
  Quasi-synthetic sequence derived from human genome
WYIFYFVIQRKKWVDLAWMITFYVRFFLTYVPLLGLKAFLGLFFIVRFL

SEQ ID NO: 41952 - protein, 49 aa, Artificial Sequence
  Quasi-synthetic sequence derived from human genome
LVVRLILMTYFKVINQMLVFFAAKNFLVVVLQLYRLVVLALAVRASLRS

SEQ ID NO: 41953 - protein, 49 aa, Artificial Sequence
  Quasi-synthetic sequence derived from human genome
QGRSLPVKITVYRRSSLYIILSTGGIFLLVTLVTVCACWKPSKRKQKKL

SEQ ID NO: 41954 - protein, 49 aa, Artificial Sequence
  Quasi-synthetic sequence derived from human genome
GTQKSLVYGLVGAGVVLMLIILVALLMLVFRSKREVKRQKYRLSQLYKW

SEQ ID NO: 41955 - protein, 49 aa, Artificial Sequence
  Quasi-synthetic sequence derived from human genome
FRNPMEAKKRIIKLEKEIASLRRKMKTCLQKERRATRRWIKATCLVKNL

SEQ ID NO: 41956 - protein, 49 aa, Artificial Sequence
  Quasi-synthetic sequence derived from human genome
FLTESNKSVLQFQNVRRVVQIFRIMRILRILKLARHSTGLQSLGFTLRR

SEQ ID NO: 41957 - protein, 49 aa, Artificial Sequence
  Quasi-synthetic sequence derived from human genome
GRSKIFIRNPRTLFKLEDLRKQRLEDLATLIQKIYRGWKCRTHFLLMKK

SEQ ID NO: 41958 - protein, 49 aa, Artificial Sequence
  Quasi-synthetic sequence derived from human genome
LKASKKKKRASFKRKSSKKGPEEGRWRPFIIRPTPSPLMKPLLVFVNPK

SEQ ID NO: 41959 - protein, 49 aa, Artificial Sequence
  Quasi-synthetic sequence derived from human genome
SLRFKRTHIKMKKQPKGYGLRCHRAIITICRLIGIKDMYAKVSGSINML

SEQ ID NO: 41960 - protein, 49 aa, Artificial Sequence
  Quasi-synthetic sequence derived from human genome
IFPSRMAQTIMKARLKGAQTGRNLLKKKSDALTLRFRQILKKIIETKML

SEQ ID NO: 41961 - protein, 49 aa, Artificial Sequence
  Quasi-synthetic sequence derived from human genome
WYSLYTRTWLGYLFYRQQLRRARNRYPKGHSKTQPRLFNGVKVLPIPVL

SEQ ID NO: 41962 - protein, 49 aa, Artificial Sequence
  Quasi-synthetic sequence derived from human genome
LFVKRLRRKTYLSNMAKTMRMVLKSKRRVSVLKSDLQAIINQGTLATSK

SEQ ID NO: 41963 - protein, 49 aa, Artificial Sequence
  Quasi-synthetic sequence derived from human genome
GLWRMQVFAMARLRFLKLKRQTKVLLTLLLVFGIAIFPLIVENIMYAML

SEQ ID NO: 41964 - protein, 49 aa, Artificial Sequence
  Quasi-synthetic sequence derived from human genome
LKQSGKFPGNPWPPYKKRTSLHPSYKGLMRLLHCKTLHIVLFTLLYKIL

SEQ ID NO: 41965 - protein, 49 aa, Artificial Sequence
  Quasi-synthetic sequence derived from human genome
ELAFRKAKIRDRVSKLLASVILLPWPPKVLGLKNVTGRLLVGLRWWNQI

SEQ ID NO: 41966 - protein, 49 aa, Artificial Sequence
  Quasi-synthetic sequence derived from human genome
APRRRRYTLTPARLRWDHFNLTYRILSFPRNLLSPRETRRALAAAFRMW

SEQ ID NO: 41967 - protein, 49 aa, Artificial Sequence
  Quasi-synthetic sequence derived from human genome
LVRLLQQGHRCLLAPVAPKLVPPVRGVKKGFRAAFRFQKELERQRLLRC

SEQ ID NO: 41968 - protein, 49 aa, Artificial Sequence
  Quasi-synthetic sequence derived from human genome
RRHYYLLRQFKIFSDFRMNKAFVTWKLNVKRIKTEKSRSFLYHHLFLAD

SEQ ID NO: 41969 - protein, 49 aa, Artificial Sequence
  Quasi-synthetic sequence derived from human genome
LFFVFMGTIKLTPRLSKDAYSEMKRAYKSYVRALPLLKKMGINSILLRK

SEQ ID NO: 41970 - protein, 49 aa, Artificial Sequence
  Quasi-synthetic sequence derived from human genome
FCVEHHTYHIKNYIINKDILRRVLVLMASKHAFLALCALRFKRKIIGLK

SEQ ID NO: 41971 - protein, 49 aa, Artificial Sequence
  Quasi-synthetic sequence derived from human genome
SAARVLQEAWMFYKHTRRKESHAARRHQRKLLAAINAFRQVRLKHRKLR

SEQ ID NO: 41972 - protein, 49 aa, Artificial Sequence
  Quasi-synthetic sequence derived from human genome
LQPLKNIYLPHVMLLAKIKMRIGHTVAKQVYYKNKRKDPSKWLPALHLF

SEQ ID NO: 41973 - protein, 49 aa, Artificial Sequence
  Quasi-synthetic sequence derived from human genome
NEVVKMRKEVKRIRVLVIRKLVRSVGRLKSKKGTEDALLKNQRRAQRLL

SEQ ID NO: 41974 - protein, 49 aa, Artificial Sequence
  Quasi-synthetic sequence derived from human genome
KKLTTLSRRVVKVLFGDKMFHPHTLFDQFIATKVCNRKLFRRICSNFLF

SEQ ID NO: 41975 - protein, 49 aa, Artificial Sequence
  Quasi-synthetic sequence derived from human genome
LKLAKQRSVCTWGKNKPGIGAVILKRAKALAGQSVRICKGPRAVFSRIL

SEQ ID NO: 41976 - protein, 49 aa, Artificial Sequence
  Quasi-synthetic sequence derived from human genome
RWMRLRIRRMADAWIQAIKSLAEKQNLEKRKRKKVLVHLGLLTKESGFK

SEQ ID NO: 41977 - protein, 49 aa, Artificial Sequence
  Quasi-synthetic sequence derived from human genome
RLLGAVQKGWIRCNTTIRKSGFGGITMLFTGYFVLCCSWSFRRLKLQRW

SEQ ID NO: 41978 - protein, 49 aa, Artificial Sequence
  Quasi-synthetic sequence derived from human genome
IRRRSKFANLGRIFKPWKWRKKKSEKFKHTSAALERKISMRQSREELIK

SEQ ID NO: 41979 - protein, 49 aa, Artificial Sequence
  Quasi-synthetic sequence derived from human genome
AKQPAKKKRKKGLRIKGKRRRKKLILAKKFSKDLGSGRPVADAPALLAS

SEQ ID NO: 41980 - protein, 49 aa, Artificial Sequence
  Quasi-synthetic sequence derived from human genome
LPKYKKNLKALYVVHPTSFIKVLWNILKPLISHKFGKKVIYFNYLSELH

SEQ ID NO: 41981 - protein, 49 aa, Artificial Sequence
  Quasi-synthetic sequence derived from human genome
DCIGLMDRTPLIAAGVIGGLFILVIVGLTFAVYVRRKSIKKKRALRRFL

SEQ ID NO: 41982 - protein, 49 aa, Artificial Sequence
  Quasi-synthetic sequence derived from human genome
LLIISCRKLFYFKIWAFLDVSFVERILKSQKERQCALRVFKARIYTNRY

SEQ ID NO: 41983 - protein, 49 aa, Artificial Sequence
  Quasi-synthetic sequence derived from human genome
LRILSKYHRFISFTLYLIGFCMFVLSLVKKHYRLQFYMFGWTHVTLLIV

SEQ ID NO: 41984 - protein, 49 aa, Artificial Sequence
  Quasi-synthetic sequence derived from human genome
KLPTVIACLPPPVKYFFFLSERKMSKKFVELKKAGLLVWNLIVIICRIF

SEQ ID NO: 41985 - protein, 49 aa, Artificial Sequence
  Quasi-synthetic sequence derived from human genome
KAKLAVLLVTLVAAAVSYLRMEQKLRRGVAPRQPRIPRPQHKVRGYRYL

SEQ ID NO: 41986 - protein, 49 aa, Artificial Sequence
  Quasi-synthetic sequence derived from human genome
IWWIIRGPVILSILINFILFINILRILMRKLRTQETRGNEVSHYKRLAR

SEQ ID NO: 41987 - protein, 49 aa, Artificial Sequence
  Quasi-synthetic sequence derived from human genome
LRLIILWLCILHSMCNLFCCLLFSMCNLFCSLLFIIPKKLMIFLRTVIR

SEQ ID NO: 41988 - protein, 49 aa, Artificial Sequence
  Quasi-synthetic sequence derived from human genome
AKLRLLSSFDFFLTDARIRRLLPSLIGRHFYQRKKVPVSVNLLSKNLSR

SEQ ID NO: 41989 - protein, 49 aa, Artificial Sequence
  Quasi-synthetic sequence derived from human genome
RQKENGPFLRKCFAISLLVICIIISIGIFYGFVANHQVRTRIKRSRKLA

SEQ ID NO: 41990 - protein, 49 aa, Artificial Sequence
  Quasi-synthetic sequence derived from human genome
PLVLNRVPLRRTHQKFVIATSTKIDISNVKIPKHLTDAYFKKKKLRKPR

SEQ ID NO: 41991 - protein, 49 aa, Artificial Sequence
  Quasi-synthetic sequence derived from human genome
AKAFCGMKYSYVLKIKILSAHDKGTHVEVNVKIKKVLKSTKLKIFRGKR

SEQ ID NO: 41992 - protein, 49 aa, Artificial Sequence
  Quasi-synthetic sequence derived from human genome
KFMVLLWKNFILKRRRCIALVVEMVLTFLFSAALLATRSVITINKNGPF

SEQ ID NO: 41993 - protein, 49 aa, Artificial Sequence
  Quasi-synthetic sequence derived from human genome
TILRSLTDAVPLSVLILGLLIMFITIVFCAAGIVVLVLHRRRRYKKKQV

SEQ ID NO: 41994 - protein, 49 aa, Artificial Sequence
  Quasi-synthetic sequence derived from human genome
KRMKMVSQSFTQRFRLSRDRKVAKSLAVIVSIFGLCWAPYTLLMIIRAA

SEQ ID NO: 41995 - protein, 49 aa, Artificial Sequence
  Quasi-synthetic sequence derived from human genome
IKGGHARSKNWRLSVRCGGWPLRWLMENGFLPDPPRIRYRKKKRILKSQ

SEQ ID NO: 41996 - protein, 49 aa, Artificial Sequence
  Quasi-synthetic sequence derived from human genome
RRRQEGLRSICMHTKKRVSSFRGNKIVLKDVITLRRHVETKVRAKIRKR

SEQ ID NO: 41997 - protein, 49 aa, Artificial Sequence
  Quasi-synthetic sequence derived from human genome
FKHKHKDCVLYLLSKMWSTVSFPKISVPMRIYIKIKQWILRAQSHSLHK

SEQ ID NO: 41998 - protein, 49 aa, Artificial Sequence
  Quasi-synthetic sequence derived from human genome
VHLLKIKNTFCLWKRLIKLKDNHCEQLRVKIRKLKNKASVLQKRISEKE

SEQ ID NO: 41999 - protein, 49 aa, Artificial Sequence
  Quasi-synthetic sequence derived from human genome
LKSFLQERLGIHLIRRKIVKPKHHVLMSRKESWKVKSEIPKVPKQPLVL

SEQ ID NO: 42000 - protein, 49 aa, Artificial Sequence
  Quasi-synthetic sequence derived from human genome
FHLSTPRSHHLYHARLWLHVLPTLPGTLCLRIFRWGPRRRRQGSRTLLA

SEQ ID NO: 42001 - protein, 50 aa, Artificial Sequence
  Quasi-synthetic sequence derived from human genome
LLLKRGSCRSTWLRVRKARPQLILSRRPRRRLGSLRWCGRRRLRWRLLQA

SEQ ID NO: 42002 - protein, 50 aa, Artificial Sequence
  Quasi-synthetic sequence derived from human genome
STAFCLLAKGLLIFLLLVILAMGLWVIRVQKRHKMPRMKKLMRNRMKLRK

SEQ ID NO: 42003 - protein, 50 aa, Artificial Sequence
  Quasi-synthetic sequence derived from human genome
AIFRGKKARRHLKMMHIAATLIQRRFRTLMMRRRFLSLKKTAILIQRKYR

SEQ ID NO: 42004 - protein, 50 aa, Artificial Sequence
  Quasi-synthetic sequence derived from human genome
IKLLRNIPRWTHLLRLLRLIILLRIFHLFHQKRQLEKLIRRRVSENKRRY

SEQ ID NO: 42005 - protein, 50 aa, Artificial Sequence
  Quasi-synthetic sequence derived from human genome
KTAFRIYAVSTLLLFLLFFLFRLLLRFLRLCRSFYITCRRLRCFPQPPRR

SEQ ID NO: 42006 - protein, 50 aa, Artificial Sequence
  Quasi-synthetic sequence derived from human genome
FTLPYPVKIKVRFSFFLQIYLIMIFLGLYINFRHLYKQRRRRYGQKKKKI

SEQ ID NO: 42007 - protein, 50 aa, Artificial Sequence
  Quasi-synthetic sequence derived from human genome
RKVLYCVVIIQKNYRAFLLRRRFLHLKKAAIVFQKQLRGQIARRVYRQLL

SEQ ID NO: 42008 - protein, 50 aa, Artificial Sequence
  Quasi-synthetic sequence derived from human genome
MKRALGRRKGVWLRLRKILFCVLGLYIAIPFLIKLCPGIQAKLIFLNFVR

SEQ ID NO: 42009 - protein, 50 aa, Artificial Sequence
  Quasi-synthetic sequence derived from human genome
RARLIPIIVLLLQKAWRGTLARWRCRRLRAIYTIMRWFRRHKVRAHLAEL

SEQ ID NO: 42010 - protein, 50 aa, Artificial Sequence
  Quasi-synthetic sequence derived from human genome
LTLQRCLRGFFIKRRFRSLRHKIILLQSRARGYLARQRYQQMRRSLVKFR

SEQ ID NO: 42011 - protein, 50 aa, Artificial Sequence
  Quasi-synthetic sequence derived from human genome
FLRRTKAATIIQKYWRMYVVRRRYKIRRAATIVLQSYLRGFLARNRYRKI

SEQ ID NO: 42012 - protein, 50 aa, Artificial Sequence
  Quasi-synthetic sequence derived from human genome
RPHRIAGVKRFLKHAGKWSLRWFLSPRWILQFRRWARKWSRFTRSSFQVR

SEQ ID NO: 42013 - protein, 50 aa, Artificial Sequence
  Quasi-synthetic sequence derived from human genome
FHWRQKFLRVKRSAICIQSWWRGTLGRRKAAKRKWAAQTIRRLIRGFVLR

SEQ ID NO: 42014 - protein, 50 aa, Artificial Sequence
  Quasi-synthetic sequence derived from human genome
NLLRLLNKLTKWKHSRTMMLVVFKSAPILKRALKVKQAMLQLYVLKLLKL

SEQ ID NO: 42015 - protein, 50 aa, Artificial Sequence
  Quasi-synthetic sequence derived from human genome
RKGKRKTVKAVIDRFLRLHCGLWVRRKAGYKKKLWKKTPARKKRLREFVF

SEQ ID NO: 42016 - protein, 50 aa, Artificial Sequence
  Quasi-synthetic sequence derived from human genome
FLLKRFNKEKLGLLLLTFLGIVAAVLVKKYQAVLRRKALLIFLVVHRLRW

SEQ ID NO: 42017 - protein, 50 aa, Artificial Sequence
  Quasi-synthetic sequence derived from human genome
KAARIIQLAVINFLAKQRLRKRVNAALVIQKYWRRVLAQRKLLMLKKEKL

SEQ ID NO: 42018 - protein, 50 aa, Artificial Sequence
  Quasi-synthetic sequence derived from human genome
LIRIVLFLQKVWRGTLARMRYKRTKAALTIIRYYRRYKVKSYIHEVARRF

SEQ ID NO: 42019 - protein, 50 aa, Artificial Sequence
  Quasi-synthetic sequence derived from human genome
LLRNIPRWTHLVRLLRLIILIRIFHLLHQKRQLEKLMRRLVSENKRRYTR

SEQ ID NO: 42020 - protein, 50 aa, Artificial Sequence
  Quasi-synthetic sequence derived from human genome
LMRLGFLRLQALHRSRKLHQQYRLARQRIIQFQARCRAYLVRKAFRHRLW

SEQ ID NO: 42021 - protein, 50 aa, Artificial Sequence
  Quasi-synthetic sequence derived from human genome
IRLKNIRKVYGRCMWYRLRLLKPQPNIIPTVKKIVLLAGWALFLFLAYKV

SEQ ID NO: 42022 - protein, 50 aa, Artificial Sequence
  Quasi-synthetic sequence derived from human genome
RARKKRSRIPLLRKRRFQLGRSMNPRARKNRSRIPLLRKRRFQLGRSMNL

SEQ ID NO: 42023 - protein, 50 aa, Artificial Sequence
  Quasi-synthetic sequence derived from human genome
KLTHLRKRIHRPRRRTTRRWKRWFKFRKRKGEKRPRPNHKAVARRAKLKF

SEQ ID NO: 42024 - protein, 50 aa, Artificial Sequence
  Quasi-synthetic sequence derived from human genome
MRGQRSLLLGPARLCLRLLLLLGYRRRCPPLLRGLVQRWRYGKVCLRSLL

SEQ ID NO: 42025 - protein, 50 aa, Artificial Sequence
  Quasi-synthetic sequence derived from human genome
KKKKKRYLRASSNRNFLLTMRPFLKRAILVLSYVLVILYFRLWIMGGSMP

SEQ ID NO: 42026 - protein, 50 aa, Artificial Sequence
  Quasi-synthetic sequence derived from human genome
IYLRLLVKLYRFLARRTNSTFNQVVLKRLFMSRTNRPPLSLSRMIRKMKL

SEQ ID NO: 42027 - protein, 50 aa, Artificial Sequence
  Quasi-synthetic sequence derived from human genome
RVAARVQRRPWGAWLSARLWKWLKSPRSWRLGLALLLGGALLFWVLLHRR

SEQ ID NO: 42028 - protein, 50 aa, Artificial Sequence
  Quasi-synthetic sequence derived from human genome
IRGWLLRKKYLRMRKAAITMQRYVRGYQARCYAKFLRRTKAATIIQKYWR

SEQ ID NO: 42029 - protein, 50 aa, Artificial Sequence
  Quasi-synthetic sequence derived from human genome
RLQQRLYLQKKIIQKHFEKKKDIRRGIGYLKLICFLIPFLLSLKKKMKVP

SEQ ID NO: 42030 - protein, 50 aa, Artificial Sequence
  Quasi-synthetic sequence derived from human genome
LVCLCLLQAFGYRLRRVIAAFYFPKREKKRILFLYNDLLKKRAAFTKLRR

SEQ ID NO: 42031 - protein, 50 aa, Artificial Sequence
  Quasi-synthetic sequence derived from human genome
VLKHARHFRGRKNRCYRLAVRTVIRAFVKCTKARYLKKKNMRTLWINRIT

SEQ ID NO: 42032 - protein, 50 aa, Artificial Sequence
  Quasi-synthetic sequence derived from human genome
WKTWIFWKTWIFWKTWIFRKTYIGWKTWIFSGRCGLTGRPGFGGRRRFFW

SEQ ID NO: 42033 - protein, 50 aa, Artificial Sequence
  Quasi-synthetic sequence derived from human genome
IKSLRVLRVLRPLKTIKRLPKLKAVFDCVVTSLKNVFNILIVYKLFMFIF

SEQ ID NO: 42034 - protein, 50 aa, Artificial Sequence
  Quasi-synthetic sequence derived from human genome
GVKIFRCPSPIYFANIGFFRRKLIDAVGFSPLRILRKRNKALRKIRKLQK

SEQ ID NO: 42035 - protein, 50 aa, Artificial Sequence
  Quasi-synthetic sequence derived from human genome
TIKLLPLRTFRVFRALKAISVVSRLKVIVGALLRSVKKLVNVIILTFFCL

SEQ ID NO: 42036 - protein, 50 aa, Artificial Sequence
  Quasi-synthetic sequence derived from human genome
IIRKYISKYSVFLRHRYQSRSAFLGRYLKKKKSVVSRLKKAKRTAKVLLN

SEQ ID NO: 42037 - protein, 50 aa, Artificial Sequence
  Quasi-synthetic sequence derived from human genome
RTGRRKSWRLEFLFLRRRCFLLTFYLWFLFFSRFLLMLFLPLLTSVVTFL

SEQ ID NO: 42038 - protein, 50 aa, Artificial Sequence
  Quasi-synthetic sequence derived from human genome
WIRQCYRTLDRRLRKNLRALVVVHATWYVKAFLALLRPFISSKFTRKIRF

SEQ ID NO: 42039 - protein, 50 aa, Artificial Sequence
  Quasi-synthetic sequence derived from human genome
RIPLLRKRRFQLYRSMNPRARKNRSHIPLVRKRRFQLRRCMNPRARKNRS

SEQ ID NO: 42040 - protein, 50 aa, Artificial Sequence
  Quasi-synthetic sequence derived from human genome
LFRIVRLARIGRILRLVRAARGIRTLLFALMMSLPSLFNIGLLLFLIMFI

SEQ ID NO: 42041 - protein, 50 aa, Artificial Sequence
  Quasi-synthetic sequence derived from human genome
KRCLGRREYVKKRQAAIKLEAHWRGALARKAIQRRKWAVRIIRKFIKGFI

SEQ ID NO: 42042 - protein, 50 aa, Artificial Sequence
  Quasi-synthetic sequence derived from human genome
LFRVIRLARIGRILRLIRGAKGIRTLLFALMMSLPALFNIGLLLFLVMFI

SEQ ID NO: 42043 - protein, 50 aa, Artificial Sequence
  Quasi-synthetic sequence derived from human genome
KAKQRLKRLRNIHYLFNTALFLIAWRLLIARSQMARNVWFFIVSFCYKFL

SEQ ID NO: 42044 - protein, 50 aa, Artificial Sequence
  Quasi-synthetic sequence derived from human genome
AFVVYSSIVSFYVPFIVTLLVYIKIYIVLRRRRKRVNTKRSSRAFRAHLR

SEQ ID NO: 42045 - protein, 50 aa, Artificial Sequence
  Quasi-synthetic sequence derived from human genome
RYAAIVHPLRLRHLRRPRVARLLCLGVWALILVFAVPAARVHRPSRCRYR

SEQ ID NO: 42046 - protein, 50 aa, Artificial Sequence
  Quasi-synthetic sequence derived from human genome
LFRVIRLARIGRILRLIKGAKGIRTLLFALMMSLPALFNIGLLLFLVMFI

SEQ ID NO: 42047 - protein, 50 aa, Artificial Sequence
  Quasi-synthetic sequence derived from human genome
LIPKKFQLNQHRRIKLSPLMMYEKLSMIRFRYRILRSQHFRTKSKVCKLR

SEQ ID NO: 42048 - protein, 50 aa, Artificial Sequence
  Quasi-synthetic sequence derived from human genome
PSGCRRWGQAISKSKLSRRWRRWNRFNRRRCRAAVKSVTFYWLVIVLVFL

SEQ ID NO: 42049 - protein, 50 aa, Artificial Sequence
  Quasi-synthetic sequence derived from human genome
HIIRLMLKYQKILWKVPSFLITQVRRMNEATMLLKKQLPSVRKLLRRKTL

SEQ ID NO: 42050 - protein, 50 aa, Artificial Sequence
  Quasi-synthetic sequence derived from human genome
ALLALALVGVLILFMFRRLRQFRQAQPTPQYRFRKRDKVMFYGRKIMRKV

SEQ ID NO: 42051 - protein, 50 aa, Artificial Sequence
  Quasi-synthetic sequence derived from human genome
IWWIIRTPILMTILINFLIFIRILGILLSKLRTRQMRCRDYRLRLARSTL

SEQ ID NO: 42052 - protein, 50 aa, Artificial Sequence
  Quasi-synthetic sequence derived from human genome
RRQKLLLAQLHHRKRVKAAGQIQAWWRGVLVRRTLLVAALRAWMIQCWWR

SEQ ID NO: 42053 - protein, 50 aa, Artificial Sequence
  Quasi-synthetic sequence derived from human genome
LVRRRFISLKKATIFVQRKYRATICAKHKLYQFLHLRKAAITIQSSYRRL

SEQ ID NO: 42054 - protein, 50 aa, Artificial Sequence
  Quasi-synthetic sequence derived from human genome
ERKRIQYLHAKLLKKRSKQPLGEVKRRLSLYLTKIHFWLPVLKMIRKKQM

SEQ ID NO: 42055 - protein, 50 aa, Artificial Sequence
  Quasi-synthetic sequence derived from human genome
LQQRLYLQKKIIQKHFEKKKDIRRGIGYLKLICFLIPFLLSLKKKMKVPY

SEQ ID NO: 42056 - protein, 50 aa, Artificial Sequence
  Quasi-synthetic sequence derived from human genome
SMNPRARKNRSRIPLLRKRRFQLYRSTNPRARKNRSRIPLLRKRRFQLYR

SEQ ID NO: 42057 - protein, 50 aa, Artificial Sequence
  Quasi-synthetic sequence derived from human genome
GLKVLFKKTHRILRRLFNLCKRCHRQPRFRLPKERSLSYWWNRIQSLLYC

SEQ ID NO: 42058 - protein, 50 aa, Artificial Sequence
  Quasi-synthetic sequence derived from human genome
KFKLFTLVSACIPVFRLARRRKKILFYCHFPDLLLTKRDSFLKRLYRAPI

SEQ ID NO: 42059 - protein, 50 aa, Artificial Sequence
  Quasi-synthetic sequence derived from human genome
WRRRSCWRKWKQLSRLQRNMILFLLAFLLFCGLLFYINLADHWKALAFRL

SEQ ID NO: 42060 - protein, 50 aa, Artificial Sequence
  Quasi-synthetic sequence derived from human genome
DFQRALALFVLTCVVLTFLGHRLLKRLLGPKLRRFLKPQGHPRLLLWFKR

SEQ ID NO: 42061 - protein, 50 aa, Artificial Sequence
  Quasi-synthetic sequence derived from human genome
LRMPLSRWQRRLRRAARRQVLSGHLPFCRFRLRYPSLSPSAFWVWKSLAR

SEQ ID NO: 42062 - protein, 50 aa, Artificial Sequence
  Quasi-synthetic sequence derived from human genome
FFPRRPRIHFRFPNRPFVPSRCNHRFPFQPFYWPHRYLTYRYFPRRRLQR

SEQ ID NO: 42063 - protein, 50 aa, Artificial Sequence
  Quasi-synthetic sequence derived from human genome
MAALRPLVKPKIVKKRTKKFIRHQSDRYVKIKRNWRKPRGIDNRVRRRFK

SEQ ID NO: 42064 - protein, 50 aa, Artificial Sequence
  Quasi-synthetic sequence derived from human genome
STRQRFLKLKYYSIILQSRIRMIIAVTSYKRYLWATVTIQRHWRAYLRRK

SEQ ID NO: 42065 - protein, 50 aa, Artificial Sequence
  Quasi-synthetic sequence derived from human genome
IHFILTNPRSLKHLCRLKIRKCMGRLHLRCPVFMSFLPLPNRLKAYVLYK

SEQ ID NO: 42066 - protein, 50 aa, Artificial Sequence
  Quasi-synthetic sequence derived from human genome
FVTNKYPRGVGWRILKVLLWLLAILTGLIAGKFLFHQRLFGQLLRLKMFR

SEQ ID NO: 42067 - protein, 50 aa, Artificial Sequence
  Quasi-synthetic sequence derived from human genome
KNRSRIPLLRKRRFQLYRSMNSRARKNRSQIVLFQKRRFHFFCSMSCRAW

SEQ ID NO: 42068 - protein, 50 aa, Artificial Sequence
  Quasi-synthetic sequence derived from human genome
RVRFLNLKKTIIKFQAHVRKHQQRQKYKKMKKAAVIIQTHFRAYIFAMKV

SEQ ID NO: 42069 - protein, 50 aa, Artificial Sequence
  Quasi-synthetic sequence derived from human genome
FHKIIAGSVALFLSVLVILLVIYVSWKRYPASMKQLQQRSLMRRHRKKKR

SEQ ID NO: 42070 - protein, 50 aa, Artificial Sequence
  Quasi-synthetic sequence derived from human genome
KNRSRIPLLRKRRFQLGRSMNLRARKNRSQIVLFQKRRFQFFCSMSGRAW

SEQ ID NO: 42071 - protein, 50 aa, Artificial Sequence
  Quasi-synthetic sequence derived from human genome
MPRLPVKKIRKQMKLLLLLLLLSCAAWLTYVHLGLVRQGRALRQRLGYGR

SEQ ID NO: 42072 - protein, 50 aa, Artificial Sequence
  Quasi-synthetic sequence derived from human genome
IKSLRVLRVLRPLKTIKRLPKLKAVFDCVVNSLKNVLNILIVYMLFMFIF

SEQ ID NO: 42073 - protein, 50 aa, Artificial Sequence
  Quasi-synthetic sequence derived from human genome
GRIIWHKFKQWVIPWHLNKRYNRKRFFALPYVDHFLRLEREKRARIKARK

SEQ ID NO: 42074 - protein, 50 aa, Artificial Sequence
  Quasi-synthetic sequence derived from human genome
ILKRALKVKQAMLQLYVLKLLKLQTKYLGRQWRKSNMKTMSAIYQKVRHR

SEQ ID NO: 42075 - protein, 50 aa, Artificial Sequence
  Quasi-synthetic sequence derived from human genome
KTKIFFRAGQVAYLEKLRADKLRAACIRIQKTIRGWLLRKKYLRMRKAAI

SEQ ID NO: 42076 - protein, 50 aa, Artificial Sequence
  Quasi-synthetic sequence derived from human genome
RNRYRKILREHKAVIIQKRVRGWLARTHYKRSMHAIIYLQCCFRRMMAKR

SEQ ID NO: 42077 - protein, 50 aa, Artificial Sequence
  Quasi-synthetic sequence derived from human genome
RTMMLVVFKSAPILKRALKVKQAMMQLYVLKLLKVQTKYLGRQWRKSNMK

SEQ ID NO: 42078 - protein, 50 aa, Artificial Sequence
  Quasi-synthetic sequence derived from human genome
RRPPQRPIGKAKPKKQSKKKVPFWNVQNKIILFTVFLFILAVIAWTLLWL

SEQ ID NO: 42079 - protein, 50 aa, Artificial Sequence
  Quasi-synthetic sequence derived from human genome
LVIQKYWRRVLAQRKLLMLKKEKLEKVQNKAASLIQAMWRRYRAKKYLCK

SEQ ID NO: 42080 - protein, 50 aa, Artificial Sequence
  Quasi-synthetic sequence derived from human genome
RVKAAPGPKAALAVIRGGATRAAGVFYPWRFRLLCLLRRWLPRPRAWFIR

SEQ ID NO: 42081 - protein, 50 aa, Artificial Sequence
  Quasi-synthetic sequence derived from human genome
WLTCSRWKKVQWCSLSVIKLKNKIKYRAEACIKMQKTIRMWLCKRRHKPR

SEQ ID NO: 42082 - protein, 50 aa, Artificial Sequence
  Quasi-synthetic sequence derived from human genome
RMPEKVTWMRRMRILRRLLRRYRESKKIDRHMYHSLYLKVKGNVFKNKRI

SEQ ID NO: 42083 - protein, 50 aa, Artificial Sequence
  Quasi-synthetic sequence derived from human genome
RPVLWHWLLRTGGWKVSAVTLAYLIFCLCSLVGILHLQRALVLRRKRKRM

SEQ ID NO: 42084 - protein, 50 aa, Artificial Sequence
  Quasi-synthetic sequence derived from human genome
SMNPRARKNRSRIPLLRKRRFQLYRSTNPRARKNRSRIPLLRKHRFQLYR

SEQ ID NO: 42085 - protein, 50 aa, Artificial Sequence
  Quasi-synthetic sequence derived from human genome
SPYKTMKFILWRRFRWAIILFIILFILLLFLAIFIYAFPNYAAMKLVKPF

SEQ ID NO: 42086 - protein, 50 aa, Artificial Sequence
  Quasi-synthetic sequence derived from human genome
RSAAVFIQAWWRGMLVRRTLLHAALRAWIIQCWWRQVLEKLLAKRRRMVL

SEQ ID NO: 42087 - protein, 50 aa, Artificial Sequence
  Quasi-synthetic sequence derived from human genome
SLCQAISKSKLSRRWRRWNRFNRRRCRAAVKSVTFYWLVIVLVFLNTLTI

SEQ ID NO: 42088 - protein, 50 aa, Artificial Sequence
  Quasi-synthetic sequence derived from human genome
LNKIMKTRVCRRLRRANRVLRARCRRAVKSNACYWAVLLLVFLNTLTIAS

SEQ ID NO: 42089 - protein, 50 aa, Artificial Sequence
  Quasi-synthetic sequence derived from human genome
KLFMRMASKQLRENVLVKRKRTKGKKLLLSIGVLLHKWKNVCIVLTALNF

SEQ ID NO: 42090 - protein, 50 aa, Artificial Sequence
  Quasi-synthetic sequence derived from human genome
RARPGAWRRDIFGRIIWHKFKQWVIPWHLNKRYNRKRFFALPYVDHFLRL

SEQ ID NO: 42091 - protein, 50 aa, Artificial Sequence
  Quasi-synthetic sequence derived from human genome
LMRKSQILISSWFRGNMQKKCYGKIKASVLLIQAFVRGWKARKNYRKYFR

SEQ ID NO: 42092 - protein, 50 aa, Artificial Sequence
  Quasi-synthetic sequence derived from human genome
RCIALRWVRLLGFAIVYGTIILKLYRVLQLFLSRTAQRSALLSSGRLLRR

SEQ ID NO: 42093 - protein, 50 aa, Artificial Sequence
  Quasi-synthetic sequence derived from human genome
RGFLARRRYRKMLEEHKAVILQKYARAWLARRRFQSIRRFVLNIQLTYRV

SEQ ID NO: 42094 - protein, 50 aa, Artificial Sequence
  Quasi-synthetic sequence derived from human genome
LIKPFGARKKRSWYLTWKYKLTNQRALRRFCQTGAVLFLLVTVIVNIKLI

SEQ ID NO: 42095 - protein, 50 aa, Artificial Sequence
  Quasi-synthetic sequence derived from human genome
RRARGRWEGSAPRRLLLALHRRLRGLRRAAAGTSRLLFQRLLPCGVIKFR

SEQ ID NO: 42096 - protein, 50 aa, Artificial Sequence
  Quasi-synthetic sequence derived from human genome
WKTLQKKKQQKIKEKLRIRTKAAVKIQAWWRGTLVRRTLLHAALRAWIIQ

SEQ ID NO: 42097 - protein, 50 aa, Artificial Sequence
  Quasi-synthetic sequence derived from human genome
FKLLILLIGTWALFFRKRRADMPRVFVFRALLLVLIFLFVVSYWLFYGVR

SEQ ID NO: 42098 - protein, 50 aa, Artificial Sequence
  Quasi-synthetic sequence derived from human genome
TLKKKRRNFAELKIKRLRKKFAQKMLRKARRKLIYEKAKHYHKEYRQMYR

SEQ ID NO: 42099 - protein, 50 aa, Artificial Sequence
  Quasi-synthetic sequence derived from human genome
MLLFLSVPQPRPPGARTRAGAARVARWRRLRLQQLRRLRGLLRVLRGRPG

SEQ ID NO: 42100 - protein, 50 aa, Artificial Sequence
  Quasi-synthetic sequence derived from human genome
VAAMRRIRYEFKAKNIKKKKVSIMVSVDGVKVILKKKKKLLLLQKKEWTW

SEQ ID NO: 42101 - protein, 50 aa, Artificial Sequence
  Quasi-synthetic sequence derived from human genome
PRVVHLFMSYVYLLVPPLMNPIIYSIKTKQIRQRIIKKFQFIKSLRCFWK

SEQ ID NO: 42102 - protein, 50 aa, Artificial Sequence
  Quasi-synthetic sequence derived from human genome
RLARAASRLAFQGWLRRGVLLVRAPPACLQVLRDAWRRRALRPPRGFRIR

SEQ ID NO: 42103 - protein, 50 aa, Artificial Sequence
  Quasi-synthetic sequence derived from human genome
MKVFHKYSNRNKVRHTKKKTFKCIKCSKSFFMLSCLIRHKRIHIRQNIYK

SEQ ID NO: 42104 - protein, 50 aa, Artificial Sequence
  Quasi-synthetic sequence derived from human genome
LRSKKAVWHKLLSKQRKRAVVACFRMAPLYNLPRHRSINLFLHGYQRFWI

SEQ ID NO: 42105 - protein, 50 aa, Artificial Sequence
  Quasi-synthetic sequence derived from human genome
LRRKKKKTIKMLMLVVVLFALCWFPLNCYVLLLSSKVIRTNNALYFAFHW

SEQ ID NO: 42106 - protein, 50 aa, Artificial Sequence
  Quasi-synthetic sequence derived from human genome
VLCKLVRFLFYTNLYCSILFLTCISVHRCLGVLRPLRSLRWGRARYARRV

SEQ ID NO: 42107 - protein, 50 aa, Artificial Sequence
  Quasi-synthetic sequence derived from human genome
AAFRGMKTRRHLKSMHSSATLIQSRFRSLLVRRRFISLKKATIFVQRKYR

SEQ ID NO: 42108 - protein, 50 aa, Artificial Sequence
  Quasi-synthetic sequence derived from human genome
LLLLLVVCGIGCVWHWKHRVATRFTLPRFLQRRSSRRKVCTKTFLGPRII

SEQ ID NO: 42109 - protein, 50 aa, Artificial Sequence
  Quasi-synthetic sequence derived from human genome
RRRCCRLCIWLLQTLVHLLQLGQVWRYLRALYLGLQSRWRGERLRRHFYW

SEQ ID NO: 42110 - protein, 50 aa, Artificial Sequence
  Quasi-synthetic sequence derived from human genome
KGSRRCKKRMFKFHQMKHIFEILDKMRCLRKRSTVSFLGVLVIFLLFMNL

SEQ ID NO: 42111 - protein, 50 aa, Artificial Sequence
  Quasi-synthetic sequence derived from human genome
QFCWRNLFSCINLLRILNKLTKWKHSRTMMLVVFKSAPILKRALKVKQAM

SEQ ID NO: 42112 - protein, 50 aa, Artificial Sequence
  Quasi-synthetic sequence derived from human genome
PRKKIHRRVLKKNPLKNLRIMLKLNPYAKTMRRNTILRQARNHKLRVDKA

SEQ ID NO: 42113 - protein, 50 aa, Artificial Sequence
  Quasi-synthetic sequence derived from human genome
LLKKRAAFTKLRRAAILRRERQQKAPRHPLADILHRGCPLLRRWLCRRCV

SEQ ID NO: 42114 - protein, 50 aa, Artificial Sequence
  Quasi-synthetic sequence derived from human genome
TLKSRKRRKMSKKLPPVIIKYIIINRFRGRKNMLVKLGKIDSKEKQVILT

SEQ ID NO: 42115 - protein, 50 aa, Artificial Sequence
  Quasi-synthetic sequence derived from human genome
KLYWWRFLSMWGMFSVITSYILFRATRKPLSGRTPRLVYKWFLLIYKLSY

SEQ ID NO: 42116 - protein, 50 aa, Artificial Sequence
  Quasi-synthetic sequence derived from human genome
QKTVKKKIKPTLPLRIFINVSRFFCVQLKKMVRLMYINSFISFPLNIVVL

SEQ ID NO: 42117 - protein, 50 aa, Artificial Sequence
  Quasi-synthetic sequence derived from human genome
RTYKQRLLFAKLFGHLTSARRARKSEVPHFRLKKVQNIKMWLSLRSYLKR

SEQ ID NO: 42118 - protein, 50 aa, Artificial Sequence
  Quasi-synthetic sequence derived from human genome
ILRTLFRSRSKRRHRTVKLIFAIVVAYFLSWGPYNFTLFLQTLFRTQIIR

SEQ ID NO: 42119 - protein, 50 aa, Artificial Sequence
  Quasi-synthetic sequence derived from human genome
RALALFVITCLVIFVLVHSFLKKLLGKKLTRCLKPFENSRLRLWTKWVFA

SEQ ID NO: 42120 - protein, 50 aa, Artificial Sequence
  Quasi-synthetic sequence derived from human genome
WRRYRAKKYLCKVKAACKIQAWYRCWRAHKEYLAILKAVKIIQGCFYTKL

SEQ ID NO: 42121 - protein, 50 aa, Artificial Sequence
  Quasi-synthetic sequence derived from human genome
VKGLIQGAIYAGIVIALLFLCLLPLIVKHIRKKQAKKAAAIRAKKSSKVR

SEQ ID NO: 42122 - protein, 50 aa, Artificial Sequence
  Quasi-synthetic sequence derived from human genome
KNRSRIPLLRKHRFQLYRSMNSRARKNRSQIVLFQKRRFHFFCSMSCRAW

SEQ ID NO: 42123 - protein, 50 aa, Artificial Sequence
  Quasi-synthetic sequence derived from human genome
RFLLGRLPWRVASGARRFRRWLNRYSYTVLSSWPERALISLKNRSRFLVR

SEQ ID NO: 42124 - protein, 50 aa, Artificial Sequence
  Quasi-synthetic sequence derived from human genome
RLASHCLAYANSCLNPLVYALASRHFRARFRRLWPCGRRRRHRARRALRR

SEQ ID NO: 42125 - protein, 50 aa, Artificial Sequence
  Quasi-synthetic sequence derived from human genome
RRRFLSLKKTAILIQRKYRAHLCTKHHLQFLQVQNAVIKIQSSYRRWMIR

SEQ ID NO: 42126 - protein, 50 aa, Artificial Sequence
  Quasi-synthetic sequence derived from human genome
KILCHKFMRFMMMRAENFFILRRKPVEQKKIFTIQGCYPVIRCLLRRRGW

SEQ ID NO: 42127 - protein, 50 aa, Artificial Sequence
  Quasi-synthetic sequence derived from human genome
IKAGKAFLRLKRKFIQMRRPFLERRDLIIQHIPGFWVKAFLNHPRISILI

SEQ ID NO: 42128 - protein, 50 aa, Artificial Sequence
  Quasi-synthetic sequence derived from human genome
IRILAVITIQAGVRGYLARRRIRLWHRGAMVIQATWRGYRVRRNLAHLCR

SEQ ID NO: 42129 - protein, 50 aa, Artificial Sequence
  Quasi-synthetic sequence derived from human genome
RLWGRRKCKPQMNYDKLSRALRYYYNKRILHKTKGKRFTYKFNFSKLIVV

SEQ ID NO: 42130 - protein, 50 aa, Artificial Sequence
  Quasi-synthetic sequence derived from human genome
LRIIRLVRVFRIFKLSRHSKGLQILGHTLRASMRELGLLIFFLFIGVILF

SEQ ID NO: 42131 - protein, 50 aa, Artificial Sequence
  Quasi-synthetic sequence derived from human genome
LRALRLLRIFKVTKYWASLRNLVVSLLNSMKSIISLLFLLFLFIVVFALL

SEQ ID NO: 42132 - protein, 50 aa, Artificial Sequence
  Quasi-synthetic sequence derived from human genome
TYKQRFLFAKLFSHITSARKARKYEIPHFRLKKVENIKIWLSLRSYLKRR

SEQ ID NO: 42133 - protein, 50 aa, Artificial Sequence
  Quasi-synthetic sequence derived from human genome
RQRVLPRMQARMRGFQARKRYLRRRAALGQLNTILLVAQPLLQRRQRLQL

SEQ ID NO: 42134 - protein, 50 aa, Artificial Sequence
  Quasi-synthetic sequence derived from human genome
ALIRANYWLKLVKGILPLVGMAMVPALLGLIGYHLYRKANRPKVSKKKLK

SEQ ID NO: 42135 - protein, 50 aa, Artificial Sequence
  Quasi-synthetic sequence derived from human genome
LLRRLRAVRLRSGAKALGKARRKVTVLVLVVLAVCLLCWTPFHLASVVAL

SEQ ID NO: 42136 - protein, 50 aa, Artificial Sequence
  Quasi-synthetic sequence derived from human genome
SLIFSAILKSLQSYFSPTLFRVIRLARIGRILRLIRAAKGIRTLLFALMM

SEQ ID NO: 42137 - protein, 50 aa, Artificial Sequence
  Quasi-synthetic sequence derived from human genome
VLKRPARLPCSHIFCKKCILRWLARQKTCPCCRKEVKRKKVVHMNKLRKT

SEQ ID NO: 42138 - protein, 50 aa, Artificial Sequence
  Quasi-synthetic sequence derived from human genome
MARRASRGPIAFWARRASRTRLAAWARRALLSLRSPKARRGKARRRAAKL

SEQ ID NO: 42139 - protein, 50 aa, Artificial Sequence
  Quasi-synthetic sequence derived from human genome
LVTRISILLRDLPTLKAAVIVAFAFTTLLIACLLLRVFRSGKRLKKTRKY

SEQ ID NO: 42140 - protein, 50 aa, Artificial Sequence
  Quasi-synthetic sequence derived from human genome
LDKKIDVIRRKVSKIQRFHARSLWTNHKRYGYKKHSYRLVKKLKLQKMKK

SEQ ID NO: 42141 - protein, 50 aa, Artificial Sequence
  Quasi-synthetic sequence derived from human genome
FMCGAILAKISRPKKRAKTITFSKNAVISKRGGKLCLLIRVANLRKSLLI

SEQ ID NO: 42142 - protein, 50 aa, Artificial Sequence
  Quasi-synthetic sequence derived from human genome
MRFLLRVRCWQYRQLSALHRAPRPTRPDKARRLGYKAKQGYVIYRIRVRR

SEQ ID NO: 42143 - protein, 50 aa, Artificial Sequence
  Quasi-synthetic sequence derived from human genome
KYWRRVLAQRKLLMLKKEKLEKVQNKAASLIQGYWRRYSTRQRFLKLKYY

SEQ ID NO: 42144 - protein, 50 aa, Artificial Sequence
  Quasi-synthetic sequence derived from human genome
ILRGKMMQRRPRSAEVKYFYFFKILLRLRLAILKYLFIDDKGILFVSSRK

SEQ ID NO: 42145 - protein, 50 aa, Artificial Sequence
  Quasi-synthetic sequence derived from human genome
VLKVIRTGKRKKKAWKRMVTKVCFVGDGFTRKPPKYERFIRPMGLRFKKA

SEQ ID NO: 42146 - protein, 50 aa, Artificial Sequence
  Quasi-synthetic sequence derived from human genome
MKIQATWKCYKARKFFLFYRQQKWASGVIAIAWLLYCHKTRLKKILKESR

SEQ ID NO: 42147 - protein, 50 aa, Artificial Sequence
  Quasi-synthetic sequence derived from human genome
RLWGIRKCKPHMNYDKLSRALRYYYNKRILHKTKGKRFTYKFNFSKVVLV

SEQ ID NO: 42148 - protein, 50 aa, Artificial Sequence
  Quasi-synthetic sequence derived from human genome
LRALRLLRIFKVTKYWSSLRNLVVSLLNSMKSIISLLFLLFLFIVVFALL

SEQ ID NO: 42149 - protein, 50 aa, Artificial Sequence
  Quasi-synthetic sequence derived from human genome
VVFWLGYFNSCLNPIIYPCSSKEFKRAFVRILGCQCRGRGRRRRRRRRRL

SEQ ID NO: 42150 - protein, 50 aa, Artificial Sequence
  Quasi-synthetic sequence derived from human genome
KKVLNLLKGAFPARLKKVLIVGAPIWFRVPYSIISLLLKDKVRERIQILK

SEQ ID NO: 42151 - protein, 50 aa, Artificial Sequence
  Quasi-synthetic sequence derived from human genome
LLRSARRRRRGRTDGRRFLLRRAVPGHLGLARARVERAWLAAGLLKVPLR

SEQ ID NO: 42152 - protein, 50 aa, Artificial Sequence
  Quasi-synthetic sequence derived from human genome
MRRLRRLAHLVLFCPFSKRLQGRLPGLRVRCIFLAWLGVFAGSWLVYVHY

SEQ ID NO: 42153 - protein, 50 aa, Artificial Sequence
  Quasi-synthetic sequence derived from human genome
RIRGTRMYQPLTEDEIRIFKRKKRIKRRALLFLSYILTHFIFLALLLILI

SEQ ID NO: 42154 - protein, 50 aa, Artificial Sequence
  Quasi-synthetic sequence derived from human genome
TCCRCRGRKRCIKKFSIQRFPKILVLHLKRFSESRIRTSKLTTFVNFPLR

SEQ ID NO: 42155 - protein, 50 aa, Artificial Sequence
  Quasi-synthetic sequence derived from human genome
LPMHKMINTDLSRILKSPEIQRALRAPRKKIHRRVLKKNPLKNLRIMLKL

SEQ ID NO: 42156 - protein, 50 aa, Artificial Sequence
  Quasi-synthetic sequence derived from human genome
RTTVNKFLSLANKRLPVKRAAVQFLNNAWGIQKKQNAKRFKRRWMVRKMK

SEQ ID NO: 42157 - protein, 50 aa, Artificial Sequence
  Quasi-synthetic sequence derived from human genome
MFWLIFLLIILSYIKIGKNLLRISKRRSKFPNSGKYATTARNSFIVLIIF

SEQ ID NO: 42158 - protein, 50 aa, Artificial Sequence
  Quasi-synthetic sequence derived from human genome
RKHLNKLRNIRYGFNTILVILIWRIFIARSQMARNIWYFVVSLCYKFLSY

SEQ ID NO: 42159 - protein, 50 aa, Artificial Sequence
  Quasi-synthetic sequence derived from human genome
KGKRCIVLVTELMTSGTLKTYLKRFKVMKPKVLRSWCRQILKGLLFLHTR

SEQ ID NO: 42160 - protein, 50 aa, Artificial Sequence
  Quasi-synthetic sequence derived from human genome
RRIVVSRGRLRRLLWIGFTLTAVALILWQCALLVFSFYTVSVSIKVHFRK

SEQ ID NO: 42161 - protein, 50 aa, Artificial Sequence
  Quasi-synthetic sequence derived from human genome
IVSQRKQIKRKAPRGFLKRVFKRKKPQLRLEKSGDLLVHLNCLLFVHRLA

SEQ ID NO: 42162 - protein, 50 aa, Artificial Sequence
  Quasi-synthetic sequence derived from human genome
RLWGVRKCKPQMNYDKLSRALRYYYNKRILHKTKGKRFTYKFNFNKLVLV

SEQ ID NO: 42163 - protein, 50 aa, Artificial Sequence
  Quasi-synthetic sequence derived from human genome
RCRRNKRIWASGVVLLETVLFGFLLLYFPVFILYFKPSVFRCIALRWVRL

SEQ ID NO: 42164 - protein, 50 aa, Artificial Sequence
  Quasi-synthetic sequence derived from human genome
IIMYFIFTSMAGIRNIGIWFFWIRLYKIRRGRTRPQALLFLCMILLLIVL

SEQ ID NO: 42165 - protein, 50 aa, Artificial Sequence
  Quasi-synthetic sequence derived from human genome
FKIVWSLRRRQQLARQARMKKATRFIMVVAIVFITCYLPSVSARLYFLWT

SEQ ID NO: 42166 - protein, 50 aa, Artificial Sequence
  Quasi-synthetic sequence derived from human genome
RRHFRMKLRNLFTKFIRKFGFELVKRLLPEEYHRVLVNIRKAEARAKRHR

SEQ ID NO: 42167 - protein, 50 aa, Artificial Sequence
  Quasi-synthetic sequence derived from human genome
KRKRKAKKRRKNDVVVVKGKLKLCSISGLIALCGILVLLVGIAMAVVGYW

SEQ ID NO: 42168 - protein, 50 aa, Artificial Sequence
  Quasi-synthetic sequence derived from human genome
FIQKRKFQEIKNSTIKIQAMWRRYRAKKYLCKVKAACKIQAWYRCWRAHK

SEQ ID NO: 42169 - protein, 50 aa, Artificial Sequence
  Quasi-synthetic sequence derived from human genome
ALRIQFFLQMAVYRRRFVQQKRAAITLQHYFRTWQTRKQFLLYRKAAVVL

SEQ ID NO: 42170 - protein, 50 aa, Artificial Sequence
  Quasi-synthetic sequence derived from human genome
LRRIRAAVVLQKHYRMQRARQAYQRVRRAAVVIQAFTRAMFVRRTYRQVL

SEQ ID NO: 42171 - protein, 50 aa, Artificial Sequence
  Quasi-synthetic sequence derived from human genome
FTVKLHWWRFLVIWILFSAVTAFVTFRATRKPLVQTTPRLVYKWFLLIYK

SEQ ID NO: 42172 - protein, 50 aa, Artificial Sequence
  Quasi-synthetic sequence derived from human genome
LRVIRLVRVFRIFKLSRHSKGLQILGQTLKASMRELGLLIFFLFIGVILF

SEQ ID NO: 42173 - protein, 50 aa, Artificial Sequence
  Quasi-synthetic sequence derived from human genome
LRVIRLVRVFRIFKLSRHSKGLQILGKTLQASMRELGLLIFFLFIGVILF

SEQ ID NO: 42174 - protein, 50 aa, Artificial Sequence
  Quasi-synthetic sequence derived from human genome
MWKGKTLRRQLQRQHKCAIIIQSYYRMHVQQKKWKIMKKAALLIQKYYRA

SEQ ID NO: 42175 - protein, 50 aa, Artificial Sequence
  Quasi-synthetic sequence derived from human genome
WKLFQALKLNLFGLVLPLLVMIICYTGIIKILLRRPNEKKSKAVRLIFVI

SEQ ID NO: 42176 - protein, 50 aa, Artificial Sequence
  Quasi-synthetic sequence derived from human genome
WFLNPLKSIKYLICTRYKWLIIKIVLALLGLLMLGLFLYSLPGYMVKKLL

SEQ ID NO: 42177 - protein, 50 aa, Artificial Sequence
  Quasi-synthetic sequence derived from human genome
RAWIIQCWWRMTLSRVLEKKRQAALIAYATRERAVIKLQSLVRMWRVRWR

SEQ ID NO: 42178 - protein, 50 aa, Artificial Sequence
  Quasi-synthetic sequence derived from human genome
SPSVYLVASFLFVLMLLFFTILVLSYFRYMRIYRRYIYEPLHKPQRKRKK

SEQ ID NO: 42179 - protein, 50 aa, Artificial Sequence
  Quasi-synthetic sequence derived from human genome
WFLNPLKSARYFLWHTYRWLLLKLLLLLLLLLLLALFLYSVPGYLVKKIL

SEQ ID NO: 42180 - protein, 50 aa, Artificial Sequence
  Quasi-synthetic sequence derived from human genome
MRFQQFLFAFFIFIMSLLLISGQRPVNLTMRRKLRKHNCLQRRCMPLHSR

SEQ ID NO: 42181 - protein, 50 aa, Artificial Sequence
  Quasi-synthetic sequence derived from human genome
LKLPWTQVGFSLLFLYLGSGGWRFIRVFIKTIRRDIFGGLVLLKVKAKVR

SEQ ID NO: 42182 - protein, 50 aa, Artificial Sequence
  Quasi-synthetic sequence derived from human genome
WYRMHKELRKYIYIRSCVVIIQKRFRCFQAQKLYKRRKESILTIQKYYKA

SEQ ID NO: 42183 - protein, 50 aa, Artificial Sequence
  Quasi-synthetic sequence derived from human genome
SRIHLKLHFTCQRILFLKPSCMLEVITWPIQAFVKRKVIIFLKKCLLCKV

SEQ ID NO: 42184 - protein, 50 aa, Artificial Sequence
  Quasi-synthetic sequence derived from human genome
RSWCLCKLLRFFYSLFFPGLIVCGTLCVCLVIVLWGIRLLLQRKKKLVST

SEQ ID NO: 42185 - protein, 50 aa, Artificial Sequence
  Quasi-synthetic sequence derived from human genome
VCRGYLARKAFAKKQQQLSALKVLQRNCAAYLKLRHWQWWRVFTKVKPLL

SEQ ID NO: 42186 - protein, 50 aa, Artificial Sequence
  Quasi-synthetic sequence derived from human genome
LRRRPARTLGLLLLVVLGFLVLRRLDWSTLVPLRLRHRQLGLQAKGWNFM

SEQ ID NO: 42187 - protein, 50 aa, Artificial Sequence
  Quasi-synthetic sequence derived from human genome
MKLKLNVLTIILLPVHLLITIYSALIFIPWYFLTNAKKKNAMAKRIKAKP

SEQ ID NO: 42188 - protein, 50 aa, Artificial Sequence
  Quasi-synthetic sequence derived from human genome
FLRRQQRLQEIERRRNTPFHERFFRFLLRKLYVFRRSFLMTCISLRNLIL

SEQ ID NO: 42189 - protein, 50 aa, Artificial Sequence
  Quasi-synthetic sequence derived from human genome
LRVIRLVRVFRIFKLSRHSKGLQILGQTLRASMRELGLLIFFLFIGVVLF

SEQ ID NO: 42190 - protein, 50 aa, Artificial Sequence
  Quasi-synthetic sequence derived from human genome
FLRLFRAARLIKLLRQGYTIRILLWTFVQSFKALPYVCLLIAMLFFIYAI

SEQ ID NO: 42191 - protein, 50 aa, Artificial Sequence
  Quasi-synthetic sequence derived from human genome
KVFLSSLKFHIRRFIFLFFILVIGIYPSGHSLILILGNPKLKQNAKKFLL

SEQ ID NO: 42192 - protein, 50 aa, Artificial Sequence
  Quasi-synthetic sequence derived from human genome
LFYQKVIKYIWRIGTDGRTVRRTMNIVPRTKVKTIKMFLILNLLFLLSWL

SEQ ID NO: 42193 - protein, 50 aa, Artificial Sequence
  Quasi-synthetic sequence derived from human genome
ARIIWSLRQRQMDRHAKIKRAITFIMVVAIVFVICFLPSVVVRIRIFWLL

SEQ ID NO: 42194 - protein, 50 aa, Artificial Sequence
  Quasi-synthetic sequence derived from human genome
KLHWWRFLVIWILFSAVTAFVTFRATRKPLVQTTPRLVYKWFLLIYKISY

SEQ ID NO: 42195 - protein, 50 aa, Artificial Sequence
  Quasi-synthetic sequence derived from human genome
FLKLFRAARLIKLLRQGYTIRILLWTFVQSFKALPYVCLLIAMLFFIYAI

SEQ ID NO: 42196 - protein, 50 aa, Artificial Sequence
  Quasi-synthetic sequence derived from human genome
LRRKLYIHRVTLRKLLPGVQYVYRCGSAQGWSRRFRFRALKNGAHWSPRL

SEQ ID NO: 42197 - protein, 50 aa, Artificial Sequence
  Quasi-synthetic sequence derived from human genome
WLRKCYQQIDRRLRKNLKSLIIVHPSWFIRTLLAVTRPFISSKFSQKIRY

SEQ ID NO: 42198 - protein, 50 aa, Artificial Sequence
  Quasi-synthetic sequence derived from human genome
IVRVLVRAHRHRGLRPRRQKALRMILAVVLVFFVCWLPENVFISVHLLQR

SEQ ID NO: 42199 - protein, 50 aa, Artificial Sequence
  Quasi-synthetic sequence derived from human genome
KRRERAVAIVRLVLGFLWPLLTLTICYTFILLRTWSRRATRSTKTLKVVV

SEQ ID NO: 42200 - protein, 50 aa, Artificial Sequence
  Quasi-synthetic sequence derived from human genome
LKIVILGLVLPLLVMVICYSGILKTLLRCRNEKKRHRAVRLIFTIMIVYF

SEQ ID NO: 42201 - protein, 50 aa, Artificial Sequence
  Quasi-synthetic sequence derived from human genome
KGKKCIVLVTELMTSGTLKTYLKRFKVMKIKVLRSWCRQILKGLQFLHTR

SEQ ID NO: 42202 - protein, 50 aa, Artificial Sequence
  Quasi-synthetic sequence derived from human genome
IQFQARCRAYLVRKAFRHRLWAVLTVQAYARGMIARRLHQRLRAEYLWRL

SEQ ID NO: 42203 - protein, 50 aa, Artificial Sequence
  Quasi-synthetic sequence derived from human genome
LSKGRRTLRKPKRVPSIYKLKLRPRIRPRRDHRPEKQPSRIPRPLAYVFL

SEQ ID NO: 42204 - protein, 50 aa, Artificial Sequence
  Quasi-synthetic sequence derived from human genome
LKKCYQMIDRRLRKNLKSLIIVHPSWFIRTVLAISRPFISVKFINKIQYV

SEQ ID NO: 42205 - protein, 50 aa, Artificial Sequence
  Quasi-synthetic sequence derived from human genome
FLKRATLKNLRKQYRNVKKMTAKELVKVLFSFFWMLFVGLFQLLFTILGG

SEQ ID NO: 42206 - protein, 50 aa, Artificial Sequence
  Quasi-synthetic sequence derived from human genome
LLRRVTRNLVRNKLAVITRLLQNLIMGLFLLFFVLRVRSNVLKGAIQDRV

SEQ ID NO: 42207 - protein, 50 aa, Artificial Sequence
  Quasi-synthetic sequence derived from human genome
IYILVCLFFVFLSLLEYVYINYLFYSRGPRRQPRRHRRPRRVIARYRYQQ

SEQ ID NO: 42208 - protein, 50 aa, Artificial Sequence
  Quasi-synthetic sequence derived from human genome
LRLLRALRVLYVMRLARHSLGLRSLGLTMRRCAREFGLLLLFLCVAMALF

SEQ ID NO: 42209 - protein, 50 aa, Artificial Sequence
  Quasi-synthetic sequence derived from human genome
KFLNLNLRYSFLKTASFFVRLGPMALAFKVRGLLDCKHSWKRLKDIRKIF

SEQ ID NO: 42210 - protein, 50 aa, Artificial Sequence
  Quasi-synthetic sequence derived from human genome
GVAVVVTAVLILLVVRRLRVPKTPAPDGPRYRFRKRDKVLFYGRKIMRKV

SEQ ID NO: 42211 - protein, 50 aa, Artificial Sequence
  Quasi-synthetic sequence derived from human genome
RLCLLRFPSRYWLGAYQLQRVVLAFMVPLGVITTSYLLLLAFLQRRQRRR

SEQ ID NO: 42212 - protein, 50 aa, Artificial Sequence
  Quasi-synthetic sequence derived from human genome
LPRRRGRPSRRFLGKKYRKYYYKSPKPLLRPFLCRICGSRFLSHEDLRFH

SEQ ID NO: 42213 - protein, 50 aa, Artificial Sequence
  Quasi-synthetic sequence derived from human genome
AVLAPWPRPPPRRFSPPRRMLPPPPMWRRSPPRMRRRSRSPRRRSPVRRR

SEQ ID NO: 42214 - protein, 50 aa, Artificial Sequence
  Quasi-synthetic sequence derived from human genome
KRYNRKRFFALPYVDHFLRLEREKRARIKARKENLERKKAKILLKKFPHL

SEQ ID NO: 42215 - protein, 50 aa, Artificial Sequence
  Quasi-synthetic sequence derived from human genome
KALPSLVRPRVFIKDMAPGKVVPMNCWGVYQAVRWLRWKASLIKLRALRR

SEQ ID NO: 42216 - protein, 50 aa, Artificial Sequence
  Quasi-synthetic sequence derived from human genome
LRTFRLLRVLKLVRFMPALRRQLVVLMKTMDNVATFCMLLMLFIFIFSIL

SEQ ID NO: 42217 - protein, 50 aa, Artificial Sequence
  Quasi-synthetic sequence derived from human genome
RFLFNELRPAVCNDLSIMSKFKLLSSLPRWRRIAQKIIRERRKKRVPKKP

SEQ ID NO: 42218 - protein, 50 aa, Artificial Sequence
  Quasi-synthetic sequence derived from human genome
FPGWRRRHWAVKMVTCFIIGLLFPVFSVCYLIAPKSPLGLFIRKPFIKFI

SEQ ID NO: 42219 - protein, 50 aa, Artificial Sequence
  Quasi-synthetic sequence derived from human genome
VKILRVLRVLRPLRAINRAKGLKHVVQCVFVAIRTIGNIMIVTTLLQFMF

SEQ ID NO: 42220 - protein, 50 aa, Artificial Sequence
  Quasi-synthetic sequence derived from human genome
KRQRLPSVENRPKIAAFLPARQLWKWFGKPTQRRGMKGKARKLFYKAIVR

SEQ ID NO: 42221 - protein, 50 aa, Artificial Sequence
  Quasi-synthetic sequence derived from human genome
LLVSPRGCRARRGLRGLLMAHSQRLLFRIGYSLYTRTWLGYLFYRQQLRR

SEQ ID NO: 42222 - protein, 50 aa, Artificial Sequence
  Quasi-synthetic sequence derived from human genome
VKILRVLRVLRPLRAINRAKGLKHVVQCVFVAIRTIGNIVIVTTLLQFMF

SEQ ID NO: 42223 - protein, 50 aa, Artificial Sequence
  Quasi-synthetic sequence derived from human genome
PTRRPRPRRELSLGRKKAPHRLCGRFSRISMKLPRIPLRRQKLPKVVVAH

SEQ ID NO: 42224 - protein, 50 aa, Artificial Sequence
  Quasi-synthetic sequence derived from human genome
LLYLNRAACHLKLKNLHKAIEDSSKAYRIMKRHLRLIHPTKLYKLMLRRF

SEQ ID NO: 42225 - protein, 50 aa, Artificial Sequence
  Quasi-synthetic sequence derived from human genome
WFKASRVYTLVLGFVLPVCTICVLYTDLLRRLRAVRLRSGAKALGKARRK

SEQ ID NO: 42226 - protein, 50 aa, Artificial Sequence
  Quasi-synthetic sequence derived from human genome
RKPLSGRTPRLVYKWFLLIYKLSYAFGVVGYLAIMFTMCGFNLFFKIKAR

SEQ ID NO: 42227 - protein, 50 aa, Artificial Sequence
  Quasi-synthetic sequence derived from human genome
AAFRRLKAHNLCRQIRAACVIQSYWRMRQDRVRFLNLKKTIIKFQAHVRK

SEQ ID NO: 42228 - protein, 50 aa, Artificial Sequence
  Quasi-synthetic sequence derived from human genome
GVLILFMFRRLRQFRQAQPTPQYRFRKRDKVMFYGRKIMRKVTTLPNTLV

SEQ ID NO: 42229 - protein, 50 aa, Artificial Sequence
  Quasi-synthetic sequence derived from human genome
LRRIILLQRWFRVLLCRQHFLHLRQASVIIQRFWRNYLNQKQVRDAAVQK

SEQ ID NO: 42230 - protein, 50 aa, Artificial Sequence
  Quasi-synthetic sequence derived from human genome
RKRKARTVLKSTSKLMTQMRMGKKKRAMKGKKPSFMVIRFPGRRGYGRLR

SEQ ID NO: 42231 - protein, 50 aa, Artificial Sequence
  Quasi-synthetic sequence derived from human genome
QIKPGIKIFRFVAPLYYINKECFKSALYKQTVNPILIKVAWKKAAKRKIK

SEQ ID NO: 42232 - protein, 50 aa, Artificial Sequence
  Quasi-synthetic sequence derived from human genome
LRTSFQQFSSLTNLPLRKLKFSPIKYGYQPRRNFWPARLATRLLKLRYLI

SEQ ID NO: 42233 - protein, 50 aa, Artificial Sequence
  Quasi-synthetic sequence derived from human genome
GARLFRIKCVTRIQAYWRGCVVRKWYRNLRKTVPPTDAKLRKKFFEKKFT

SEQ ID NO: 42234 - protein, 50 aa, Artificial Sequence
  Quasi-synthetic sequence derived from human genome
RVILLQKVIRGFKDRSNFLKLKNAATLIQRHWRGHNCRKNYGLMRLGFLR

SEQ ID NO: 42235 - protein, 50 aa, Artificial Sequence
  Quasi-synthetic sequence derived from human genome
RPKGYRKLLALGTWLLALLLTLPVMLAMRLVRRGPKSLCLPAWGPRAHRA

SEQ ID NO: 42236 - protein, 50 aa, Artificial Sequence
  Quasi-synthetic sequence derived from human genome
RRKEILAKYPAIKALMRPDPRLKWAVLVLVLVQMLACWLVRGLAWRWLLF

SEQ ID NO: 42237 - protein, 50 aa, Artificial Sequence
  Quasi-synthetic sequence derived from human genome
KTKAINGKYHRFLGRHFPRFYVLYTIFMKGLQMLWADAKKARRIKTNMWK

SEQ ID NO: 42238 - protein, 50 aa, Artificial Sequence
  Quasi-synthetic sequence derived from human genome
FMKLVNLYKGAVLYLLRGRKTFLIPVLFNNYITAALKLLEKLYKVNLKVK

SEQ ID NO: 42239 - protein, 50 aa, Artificial Sequence
  Quasi-synthetic sequence derived from human genome
VKVRVSYQKLLKYYVLNALKHRPPKAQKKRYLFRSFKATKFFQSTKLDWV

SEQ ID NO: 42240 - protein, 50 aa, Artificial Sequence
  Quasi-synthetic sequence derived from human genome
IAYVALVTLLIWVPVKVILHKKRYIYRKIKGWRPVLMMCVVLTTLPCLTF

SEQ ID NO: 42241 - protein, 50 aa, Artificial Sequence
  Quasi-synthetic sequence derived from human genome
LLVICLCYLLIVVKVRSAGRRVWAPSCQRRRRSERRVTRMVVAVVALFVL

SEQ ID NO: 42242 - protein, 50 aa, Artificial Sequence
  Quasi-synthetic sequence derived from human genome
VLVRRTLLVAALRAWMIQCWWRTLVQRRIRQRRQALLRVYVIQEQATVKL

SEQ ID NO: 42243 - protein, 50 aa, Artificial Sequence
  Quasi-synthetic sequence derived from human genome
VAHKVFATTSIKSFFRQLNLYGFRKRRQCTFRTFTRIFSAKRLVSILNKL

SEQ ID NO: 42244 - protein, 50 aa, Artificial Sequence
  Quasi-synthetic sequence derived from human genome
RFLCGFLVPVLIITACYLTIVCKLQRNRLAKTKKPFKIIVTIIITFFLCW

SEQ ID NO: 42245 - protein, 50 aa, Artificial Sequence
  Quasi-synthetic sequence derived from human genome
RKFKFRKMHYDRFVIFLMPHIGCIVMALSKYLMMFQIYCKVCIPALKKNI

SEQ ID NO: 42246 - protein, 50 aa, Artificial Sequence
  Quasi-synthetic sequence derived from human genome
KRRKKRYLRHDKPPYTYLAMIALVIQAAPSRRLKLAQIIRQVQAVFPFFR

SEQ ID NO: 42247 - protein, 50 aa, Artificial Sequence
  Quasi-synthetic sequence derived from human genome
MKKCYQMIDRRLRKNLKSFIIVHPSWFIRTILAVTRPFISSKFSSKIKYV

SEQ ID NO: 42248 - protein, 50 aa, Artificial Sequence
  Quasi-synthetic sequence derived from human genome
LGKLKRNMMPWALQKKREIHMAKAHRRRAARSALPMRLTSCIFRRPVTRI

SEQ ID NO: 42249 - protein, 50 aa, Artificial Sequence
  Quasi-synthetic sequence derived from human genome
KMRQAWKSWLIYVVVRRTKLQMQTTALEFRQRIILRVWWSTWRQRLGQVR

SEQ ID NO: 42250 - protein, 50 aa, Artificial Sequence
  Quasi-synthetic sequence derived from human genome
IKTFLSLVWKRRILFFVVTLVSVFLVWKFTYAHKYLLADNRHYTFYVWKR

SEQ ID NO: 42251 - protein, 50 aa, Artificial Sequence
  Quasi-synthetic sequence derived from human genome
LRALLVVVNALLRKRRYHAALAVLKGFRNGAVYGAKIRAPHALVMTFLFR

SEQ ID NO: 42252 - protein, 50 aa, Artificial Sequence
  Quasi-synthetic sequence derived from human genome
RVIHDGARLFRIKCVTRIQAYWRGCVVRKWYRNLRKTVPPTDAKLRKKFF

SEQ ID NO: 42253 - protein, 50 aa, Artificial Sequence
  Quasi-synthetic sequence derived from human genome
PARRGRRRTRAAGSLLSRAAILLFISAFLVRVPSSVGHLVRLPRAFRLTK

SEQ ID NO: 42254 - protein, 50 aa, Artificial Sequence
  Quasi-synthetic sequence derived from human genome
KVITVFLNHSNLWFAAWLKVFYCLRIANFNHPLFFLMKRKIIVLMPWLLR

SEQ ID NO: 42255 - protein, 50 aa, Artificial Sequence
  Quasi-synthetic sequence derived from human genome
LQRAGVTLRVLRMMRIFWVIKLARHFIGLQTLGLTLKRCYREMVMLLVFI

SEQ ID NO: 42256 - protein, 50 aa, Artificial Sequence
  Quasi-synthetic sequence derived from human genome
LKKKLFKRRRVLNRERRLRHRVVGAVIDQGLITRHHLKKRASSARANITL

SEQ ID NO: 42257 - protein, 50 aa, Artificial Sequence
  Quasi-synthetic sequence derived from human genome
PGSRRMIDYRHFVPQMPFVPAVAKSIPRKRISLKRPKKCFRNLFHIRRNK

SEQ ID NO: 42258 - protein, 50 aa, Artificial Sequence
  Quasi-synthetic sequence derived from human genome
FPGWRRKHWVVKLLTCMTIGFLFPMLSIAYLISPRSNLGLFIKKPFIKFI

SEQ ID NO: 42259 - protein, 50 aa, Artificial Sequence
  Quasi-synthetic sequence derived from human genome
RVIRLVRVFRIFKLSRHSKGLQILGQTLKASMRELGLLIFFLFIGVILFS

SEQ ID NO: 42260 - protein, 50 aa, Artificial Sequence
  Quasi-synthetic sequence derived from human genome
RRRGFGLFFFLRLHRLLLLFLVLRGTLANKLNVPQVLLPFGREPGRVPFL

SEQ ID NO: 42261 - protein, 50 aa, Artificial Sequence
  Quasi-synthetic sequence derived from human genome
VDRYFALVQPFRLTRWRTRYKTIRINLGLWAASFILALPVWVYSKVIKFK

SEQ ID NO: 42262 - protein, 50 aa, Artificial Sequence
  Quasi-synthetic sequence derived from human genome
KATGRKAPLWLRAKFQRLLFKLGCYIQKNCGKFLVVGLLIFGAFAVGLKA

SEQ ID NO: 42263 - protein, 50 aa, Artificial Sequence
  Quasi-synthetic sequence derived from human genome
RAGVTLRVLRMMRIFWVIKLARHFIGLQTLGLTLKRCYREMVMLLVFICV

SEQ ID NO: 42264 - protein, 50 aa, Artificial Sequence
  Quasi-synthetic sequence derived from human genome
HASSVPRSKILTVRVILAPWKKGLIAVVIIGVIIALLIIAAKCYFLRKAK

SEQ ID NO: 42265 - protein, 50 aa, Artificial Sequence
  Quasi-synthetic sequence derived from human genome
FWIVFLLLIVFYTAITKKIFKSHLKSSRNSTSVKKKSSRNIFSIVFVFFV

SEQ ID NO: 42266 - protein, 50 aa, Artificial Sequence
  Quasi-synthetic sequence derived from human genome
FRCILLRWARLLGFATVYGTVTLKLHRVLKVFLSRTAQRIPYMTGGRVMR

SEQ ID NO: 42267 - protein, 50 aa, Artificial Sequence
  Quasi-synthetic sequence derived from human genome
KLKKITKTVQQRYWAMKERNIQFQRYNKLRHSVIYIQAIFRGKKARRHLK

SEQ ID NO: 42268 - protein, 50 aa, Artificial Sequence
  Quasi-synthetic sequence derived from human genome
RPWPRWLGVAALGLAAVALGTVAWRRAWPRRRRRLQQVGTVAKLWIYPVK

SEQ ID NO: 42269 - protein, 50 aa, Artificial Sequence
  Quasi-synthetic sequence derived from human genome
PSNLTFTLFKCLLLTGGCTLLHCFVILPVFLTFFPPSKKHHKKKKRAKRK

SEQ ID NO: 42270 - protein, 50 aa, Artificial Sequence
  Quasi-synthetic sequence derived from human genome
RRLVRGSVCAGKLFIAPLIMVLGLALGAIAVVIGLFVFPIYCLCKKQRKR

SEQ ID NO: 42271 - protein, 50 aa, Artificial Sequence
  Quasi-synthetic sequence derived from human genome
LALRRRLGQLSCMSRPALKLRSWPLTVLYYLLPFGALRPLSRVGWRPVSR

SEQ ID NO: 42272 - protein, 50 aa, Artificial Sequence
  Quasi-synthetic sequence derived from human genome
KKNRLFSKVLVTIKKVYMKERSFKGVEFGKNLGLKSSLIRKPRIVSRGRR

SEQ ID NO: 42273 - protein, 50 aa, Artificial Sequence
  Quasi-synthetic sequence derived from human genome
RRSQRASFKRARRPGARALRLVLGIVLLFWACFLPFWLWQLLAQYHQAPL

SEQ ID NO: 42274 - protein, 50 aa, Artificial Sequence
  Quasi-synthetic sequence derived from human genome
KVLRGYRYRKEFLRQRRAAVTLQAWWRGYCNRRNFKLILVGFERLQAIAR

SEQ ID NO: 42275 - protein, 50 aa, Artificial Sequence
  Quasi-synthetic sequence derived from human genome
ARWSFRAYTSVLYFNPWMRIFIQAKRVKTKHLCYCLYRPRKYLYVTSSFK

SEQ ID NO: 42276 - protein, 50 aa, Artificial Sequence
  Quasi-synthetic sequence derived from human genome
LPTAFRVAKKRAPKVLGTTLVVGLLAGVGYFAFMLFRKRLGSMILAFRPR

SEQ ID NO: 42277 - protein, 50 aa, Artificial Sequence
  Quasi-synthetic sequence derived from human genome
PRFIGNWWSGFLLCAIAMFLVIFPMFTFPKKLPPRHKKKKKKKFSVDAVS

SEQ ID NO: 42278 - protein, 50 aa, Artificial Sequence
  Quasi-synthetic sequence derived from human genome
RLRFGPRRALAALVRRGWRCGYLECSAKYNWHVLRLFRELLRCALVRARP

SEQ ID NO: 42279 - protein, 50 aa, Artificial Sequence
  Quasi-synthetic sequence derived from human genome
LKRLRLLPALLILRAFKPHRKIRDYRVVVVGTAGVGKSTLLHKWASGNFR

SEQ ID NO: 42280 - protein, 50 aa, Artificial Sequence
  Quasi-synthetic sequence derived from human genome
MRKAAIVIQVRCRAYYQGKMQREKYLTILKAVKVLQASFRGVRVRRTLRK

SEQ ID NO: 42281 - protein, 50 aa, Artificial Sequence
  Quasi-synthetic sequence derived from human genome
FAWNKWIDIKQFVWYTPPTFMIAVFLPIVVLIFKSILFLPCLRKKILKIR

SEQ ID NO: 42282 - protein, 50 aa, Artificial Sequence
  Quasi-synthetic sequence derived from human genome
KYKKFPHWLDKWMLTRKQFGLLSLFFAVLHAIYTLSYAMRRSYRYKLLNW

SEQ ID NO: 42283 - protein, 50 aa, Artificial Sequence
  Quasi-synthetic sequence derived from human genome
KKIFCCLFFITLFFIRLLSYMFFHVRFINPDLLVNVLPKVLGRSTLWKLR

SEQ ID NO: 42284 - protein, 50 aa, Artificial Sequence
  Quasi-synthetic sequence derived from human genome
KYKKFPHWLDKWMLTRKQFGLLSFFFAVLHAIYSLSYPMRRSYRYKLLNW

SEQ ID NO: 42285 - protein, 50 aa, Artificial Sequence
  Quasi-synthetic sequence derived from human genome
FDAFNVPVFWPILVMYFIMLFCITMKRQIKHMIKYRYIPFTHGKRRYRGK

SEQ ID NO: 42286 - protein, 50 aa, Artificial Sequence
  Quasi-synthetic sequence derived from human genome
RRSRTPSRRRRSRSVVRRRSFSISPVRLRRSRTPLRRRFSRSPIRRKRSR

SEQ ID NO: 42287 - protein, 50 aa, Artificial Sequence
  Quasi-synthetic sequence derived from human genome
VMRRHCRTLRQRSRRPKMRPARRRGGRRQLLLRALDAVATCWEKLFALRA

SEQ ID NO: 42288 - protein, 50 aa, Artificial Sequence
  Quasi-synthetic sequence derived from human genome
RKFVFFNIPQIQYKNPWVQIMMFKNMTPSPFLRFYLGKPSGKRRRRKSSF

SEQ ID NO: 42289 - protein, 50 aa, Artificial Sequence
  Quasi-synthetic sequence derived from human genome
RLTYLIKKTWMFGLPFCKFVSAMLHIHMYLTFLFYVVILVTRYLIFFKCK

SEQ ID NO: 42290 - protein, 50 aa, Artificial Sequence
  Quasi-synthetic sequence derived from human genome
FLRVVRFVRILRIFKLTRHFVGLRVLGHTLRASTNEFLLLIIFLALGVLI

SEQ ID NO: 42291 - protein, 50 aa, Artificial Sequence
  Quasi-synthetic sequence derived from human genome
LSRMPKGMWICQVCRPKKKGRKLLHEKAAQIKRRYAKPIGRPKNKLKQRL

SEQ ID NO: 42292 - protein, 50 aa, Artificial Sequence
  Quasi-synthetic sequence derived from human genome
FAVIGIASGFGGALFVYLNRKIVQVMRKQKTINRFLMRKRLLFPALVTLL

SEQ ID NO: 42293 - protein, 50 aa, Artificial Sequence
  Quasi-synthetic sequence derived from human genome
LARKAIQRRKWAVRIIRKFIKGFISRNKPLCPDNEEFIVFVRKNYILNLR

SEQ ID NO: 42294 - protein, 50 aa, Artificial Sequence
  Quasi-synthetic sequence derived from human genome
LLLVPLLVLALASYRRLCLRLRLADCLVPYSRALYRRRRAPQPRQIRASP

SEQ ID NO: 42295 - protein, 50 aa, Artificial Sequence
  Quasi-synthetic sequence derived from human genome
LLSLKKNKIHSLPDKVFIKYTKLKKIFLQHNCIRHISRKAFFGLCNLQIL

SEQ ID NO: 42296 - protein, 50 aa, Artificial Sequence
  Quasi-synthetic sequence derived from human genome
TSEFKGAALVSPISKRWTHLVRLLRLIILIRIFHLLHQKRQLEKLMRRLV

SEQ ID NO: 42297 - protein, 50 aa, Artificial Sequence
  Quasi-synthetic sequence derived from human genome
KICWGLGIEYTFPPLYYRRAHRRFVTKKALCIRVFQETQKLKKRRRALKA

SEQ ID NO: 42298 - protein, 50 aa, Artificial Sequence
  Quasi-synthetic sequence derived from human genome
KGKKCIVLVTELMTSGTLKTYLKRFKVMKPKVLRSWCRQILKGLQFLHTR

SEQ ID NO: 42299 - protein, 50 aa, Artificial Sequence
  Quasi-synthetic sequence derived from human genome
RIPREHVHNASAHLTFNKFWRRYGKLSRHLMKVKLKKYTKFLFVRDPFVR

SEQ ID NO: 42300 - protein, 50 aa, Artificial Sequence
  Quasi-synthetic sequence derived from human genome
MNVRMPFRRKIYYLPRRYKFMSRIDKQISRFRRWLPKKPMRLDKETLPDL

SEQ ID NO: 42301 - protein, 50 aa, Artificial Sequence
  Quasi-synthetic sequence derived from human genome
MSSHKTFRIKRFLAKKQKQNRPIPQWIRMKTGNKIRYNSKRRHWRRTKLG

SEQ ID NO: 42302 - protein, 50 aa, Artificial Sequence
  Quasi-synthetic sequence derived from human genome
TWYYSLSQIKFSPVAKKLFVVTAVSAISVIFLAHHFKRKRGKKKGKILPW

SEQ ID NO: 42303 - protein, 50 aa, Artificial Sequence
  Quasi-synthetic sequence derived from human genome
RTIFLVLLFSQYARNVKFPLPIYKSKKGWTAYKLQLFKMFPIILAILVSW

SEQ ID NO: 42304 - protein, 50 aa, Artificial Sequence
  Quasi-synthetic sequence derived from human genome
VVVMKFFRWVRRAWQRIISWVFFWRQKIKPTISGHPDSKKHSLKKMEKTL

SEQ ID NO: 42305 - protein, 50 aa, Artificial Sequence
  Quasi-synthetic sequence derived from human genome
PARLRPRLHFCLVLLLLLVVPAAWGCGPGRVVGSRRRPPRKLVPLAYKQF

SEQ ID NO: 42306 - protein, 50 aa, Artificial Sequence
  Quasi-synthetic sequence derived from human genome
RIPLLRKRRFQLCRCMNPRARKNRSQIVLFQKLRFQFFCSMSCRAWVSPE

SEQ ID NO: 42307 - protein, 50 aa, Artificial Sequence
  Quasi-synthetic sequence derived from human genome
LQALVRGWLVRKRFLEQRAKIRLLHFTAAAYYHLNAVRIQRAYKLYLAVK

SEQ ID NO: 42308 - protein, 50 aa, Artificial Sequence
  Quasi-synthetic sequence derived from human genome
NSRGMLPVAVLVALLAVIVLVALLLLWRRRQKRRTGALVLSRGGKRNGVV

SEQ ID NO: 42309 - protein, 50 aa, Artificial Sequence
  Quasi-synthetic sequence derived from human genome
LRARVSYRLLGVISLLHLVLSMGLQLYGFRQRQRARKEWRLHRGLSHRRA

SEQ ID NO: 42310 - protein, 50 aa, Artificial Sequence
  Quasi-synthetic sequence derived from human genome
RISRVCHRWKRLVDDRWLWRHVDLTLYTMRPKVMWHLLRRYMASRLHSLR

SEQ ID NO: 42311 - protein, 50 aa, Artificial Sequence
  Quasi-synthetic sequence derived from human genome
LGKSCKPIPVMLLGVTLLKKKYPLAKYLCVLLIVAGVALFMYKPKKVVGI

SEQ ID NO: 42312 - protein, 50 aa, Artificial Sequence
  Quasi-synthetic sequence derived from human genome
LIIRSLRQGLRVEKRLKTKAVRMIAIVLAIFLVCFVPYHVNRSVYVLHYR

SEQ ID NO: 42313 - protein, 50 aa, Artificial Sequence
  Quasi-synthetic sequence derived from human genome
AIIVILLLVDVVYIFFDIKLLRNIPRWTHLLRLLRLIILLRIFHLFHQKR

SEQ ID NO: 42314 - protein, 50 aa, Artificial Sequence
  Quasi-synthetic sequence derived from human genome
WLLAWPGLALPLVAMAAGGRWVRQQGPRVRRGISRLWLRVLLRLSPMAFR

SEQ ID NO: 42315 - protein, 50 aa, Artificial Sequence
  Quasi-synthetic sequence derived from human genome
LYGAIFRLVQASGQKAPRPAARRKARRLLKTVLMILLAFLVCWGPLFGLL

SEQ ID NO: 42316 - protein, 50 aa, Artificial Sequence
  Quasi-synthetic sequence derived from human genome
RSGKIPSRFKRSYNYKTIVKKILAKLKRARSKKLDNFQSEKKVFKKSFLR

SEQ ID NO: 42317 - protein, 50 aa, Artificial Sequence
  Quasi-synthetic sequence derived from human genome
LLPLHRPSWATWLDFLILKVAVGTRLHRVPVKIKRMCVNGLCRARKHRHL

SEQ ID NO: 42318 - protein, 50 aa, Artificial Sequence
  Quasi-synthetic sequence derived from human genome
ARLPERRYIENIYHSKPMRWPFFLFIPFFIIFCVLIAIMVKVNFQRKKWR

SEQ ID NO: 42319 - protein, 50 aa, Artificial Sequence
  Quasi-synthetic sequence derived from human genome
LGLFLLALLGLVVKRAVERRKALSRRARRLAVRMRALESSQRPRGSPRPR

SEQ ID NO: 42320 - protein, 50 aa, Artificial Sequence
  Quasi-synthetic sequence derived from human genome
LCCSKLVNYLTPIKHLRKSLKIIYLNSIQQLEIRNMSWPRLIRKLRCYLK

SEQ ID NO: 42321 - protein, 50 aa, Artificial Sequence
  Quasi-synthetic sequence derived from human genome
KPIVHSRKKYRFHKTRSRMTHRTPKVKKSPKVRKKSYLSRLMLSNRLPFS

SEQ ID NO: 42322 - protein, 50 aa, Artificial Sequence
  Quasi-synthetic sequence derived from human genome
YFKANLDAIIKIQAWARMWAARRQYLRRLHYFQKNVNSIVKIQAFFRARK

SEQ ID NO: 42323 - protein, 50 aa, Artificial Sequence
  Quasi-synthetic sequence derived from human genome
MKHFLRMLIQVCLYFYCKFLWRCLKFVMRKLTGRCELQRICYNTKPGASR

SEQ ID NO: 42324 - protein, 50 aa, Artificial Sequence
  Quasi-synthetic sequence derived from human genome
RNVVFGVRTSVSVIIALRRAVKRHRERRERQKRVFRMSLLIISTFLLCWT

SEQ ID NO: 42325 - protein, 50 aa, Artificial Sequence
  Quasi-synthetic sequence derived from human genome
MRRILTRNEKNRPRRRFLCHLSRQQLRMAMRIPVLYEQLKREKLRVHKAR

SEQ ID NO: 42326 - protein, 50 aa, Artificial Sequence
  Quasi-synthetic sequence derived from human genome
IYLRHVPLRKVHLFTIIQMSCLGLLWIIKVSRAAIVFPMMVLALVFVRKL

SEQ ID NO: 42327 - protein, 50 aa, Artificial Sequence
  Quasi-synthetic sequence derived from human genome
KFKGRSILLKTLCKLVDVGSDSLSLKLAKIILALKVSRKNLLNVCKLIFK

SEQ ID NO: 42328 - protein, 50 aa, Artificial Sequence
  Quasi-synthetic sequence derived from human genome
LRTLRAVRVLRPLKLVSGIPSLQVVLKSIMKAMIPLLQIGLLLFFAILIF

SEQ ID NO: 42329 - protein, 50 aa, Artificial Sequence
  Quasi-synthetic sequence derived from human genome
KKQRLSKKLRRKLQMWLWSQTFCPVLYAWNDLGSRFWPRYVKVGSCFSKR

SEQ ID NO: 42330 - protein, 50 aa, Artificial Sequence
  Quasi-synthetic sequence derived from human genome
KKFKLWLLNALEGVPALLQISKLKEVTLFVKRLRRKTYLSNMAKTMRMVL

SEQ ID NO: 42331 - protein, 50 aa, Artificial Sequence
  Quasi-synthetic sequence derived from human genome
SKPIVHARKKYRFHKTRSHVTHRTPKVKKSPKVRKKSYLSRLMLANRLPF

SEQ ID NO: 42332 - protein, 50 aa, Artificial Sequence
  Quasi-synthetic sequence derived from human genome
RALRYYYNKRILHKTKGKRFTYKFNFNKLVMPNYPFINIRSSGKIQTLLV

SEQ ID NO: 42333 - protein, 50 aa, Artificial Sequence
  Quasi-synthetic sequence derived from human genome
RGWLQKVKYHRLKGATLTLQRYCRGHLARRLAEHLRRIRAAVVLQKHYRM

SEQ ID NO: 42334 - protein, 50 aa, Artificial Sequence
  Quasi-synthetic sequence derived from human genome
RLRHPRTRWKNWWVRGILTLAMIAFFFIIIYLGPMVLMIIVMCVQIKCFH

SEQ ID NO: 42335 - protein, 50 aa, Artificial Sequence
  Quasi-synthetic sequence derived from human genome
YPLRRAIVFTRQLVTYIVVGVTLRPAILVIPCLLLIKCHLKLYRTKLIYH

SEQ ID NO: 42336 - protein, 50 aa, Artificial Sequence
  Quasi-synthetic sequence derived from human genome
LHKIPLPPWALIAIAIVAVLLVLTCCFCICKKCLFKKKNKKKGKEKGGKN

SEQ ID NO: 42337 - protein, 50 aa, Artificial Sequence
  Quasi-synthetic sequence derived from human genome
QKWWRSFLGRKQYQLTVQVAYYTMMMNLYNAMAVRIQRRWRGYRVRKYLF

SEQ ID NO: 42338 - protein, 50 aa, Artificial Sequence
  Quasi-synthetic sequence derived from human genome
KNKDHFQFTNLFLCGLLSKAKQKLLRHLVPAAALRRKRKALWAHLFSSLR

SEQ ID NO: 42339 - protein, 50 aa, Artificial Sequence
  Quasi-synthetic sequence derived from human genome
LLVSLGVAIHLCCRRRRARLRFMKQKFNIVCLKISGFTTCCCFQILQISR

SEQ ID NO: 42340 - protein, 50 aa, Artificial Sequence
  Quasi-synthetic sequence derived from human genome
MKICVFIFAFVIPVLIIIVCYTLMILRLKSVRLLSGSREKDRNLRRITRL

SEQ ID NO: 42341 - protein, 50 aa, Artificial Sequence
  Quasi-synthetic sequence derived from human genome
KVGQVLRVMRLMRIFRILKLARHSTGLRAFGFTLRQCYQQVGCLLLFIAM

SEQ ID NO: 42342 - protein, 50 aa, Artificial Sequence
  Quasi-synthetic sequence derived from human genome
LKAKKAVLKGVHSHKKKKIRTSPTFRRPKTLRLRRQPKYPRKSAPRRNKL

SEQ ID NO: 42343 - protein, 50 aa, Artificial Sequence
  Quasi-synthetic sequence derived from human genome
IFPRLARHDRGNYVRLNMKQKHYVRGRALRSRLLRKQAWKQKWRKKGECF

SEQ ID NO: 42344 - protein, 50 aa, Artificial Sequence
  Quasi-synthetic sequence derived from human genome
SPHIAAARKVYIQTRRQRKLHFVVGGFAYLLPKTAVVLRCPARRVRKPLI

SEQ ID NO: 42345 - protein, 50 aa, Artificial Sequence
  Quasi-synthetic sequence derived from human genome
LRLQIIQRERRRKELFRKKNKAAAVIQRAWRSYQLRKHLSHLRHMKQLGA

SEQ ID NO: 42346 - protein, 50 aa, Artificial Sequence
  Quasi-synthetic sequence derived from human genome
CIIQCWWRLILSKILKKRRQAALEAFSRKEWAAVTLQSQARMWRIRRRYC

SEQ ID NO: 42347 - protein, 50 aa, Artificial Sequence
  Quasi-synthetic sequence derived from human genome
WRVLHALLCLHRTLTSWLRVRFGTWNWIWRRCCRAASAAVLAPLGFTLRK

SEQ ID NO: 42348 - protein, 50 aa, Artificial Sequence
  Quasi-synthetic sequence derived from human genome
IIHILQIRKLRHRLSNFPRLPGILAPETVLLPFCYKVFRKKEKVKRSQKA

SEQ ID NO: 42349 - protein, 50 aa, Artificial Sequence
  Quasi-synthetic sequence derived from human genome
FWWILRFPVFLAILINFFIFVRIVQLLVAKLRARQMHHTDYKFRLAKSTL

SEQ ID NO: 42350 - protein, 50 aa, Artificial Sequence
  Quasi-synthetic sequence derived from human genome
PSLRIARFRFRAFHFLNRFPSVYLRCKMVVCRAYDPSSRCYRGCVLRSKR

SEQ ID NO: 42351 - protein, 50 aa, Artificial Sequence
  Quasi-synthetic sequence derived from human genome
YLARRAFQKRQQQQSALRVMQRNCAAYLKLRHWQWWRLFTKVKPLLQVTR

SEQ ID NO: 42352 - protein, 50 aa, Artificial Sequence
  Quasi-synthetic sequence derived from human genome
KIFFRAGQVAYLEKLRLDKLRQSCVMVQKHMRGWLQRKKFLRERRAALII

SEQ ID NO: 42353 - protein, 50 aa, Artificial Sequence
  Quasi-synthetic sequence derived from human genome
KRKFKSLLLHKRTAIQHAYRLLISQRRPAGISYRQFEGLMRFYKPRMSAR

SEQ ID NO: 42354 - protein, 50 aa, Artificial Sequence
  Quasi-synthetic sequence derived from human genome
KIAKVQRIFTRRSKKLAVVHFFDHASAALARKKGKSLHKDMAIFWHRKKI

SEQ ID NO: 42355 - protein, 50 aa, Artificial Sequence
  Quasi-synthetic sequence derived from human genome
MKKQRKILWRKGIHLAFSEKWNTGFGGFKKFYFHQHLCILKAKLGRPVTW

SEQ ID NO: 42356 - protein, 50 aa, Artificial Sequence
  Quasi-synthetic sequence derived from human genome
LRTLRAVRVLRPLKLVSGIPSLQIVLKSIMKAMVPLLQIGLLLFFAILMF

SEQ ID NO: 42357 - protein, 50 aa, Artificial Sequence
  Quasi-synthetic sequence derived from human genome
FSPPGGPVPLSVLILSLLVLFFSAVFVAAGLFAYVLRRRRKKLPFRSKRQ

SEQ ID NO: 42358 - protein, 50 aa, Artificial Sequence
  Quasi-synthetic sequence derived from human genome
LCYLFIIIKVKSSGIRVGSSKRKKSEKKVTRMVSIVVAVFIFCWLPFYIF

SEQ ID NO: 42359 - protein, 50 aa, Artificial Sequence
  Quasi-synthetic sequence derived from human genome
IDVIRRKVSKIQRFHARSLWTNHKRYGYKKHSYRLVKKLKLQKMKKNEVY

SEQ ID NO: 42360 - protein, 50 aa, Artificial Sequence
  Quasi-synthetic sequence derived from human genome
TPAAFAGKLLSVFRQPLSSLWRSLVPLFCWLRATFWLLATKRRKQQLVLR

SEQ ID NO: 42361 - protein, 50 aa, Artificial Sequence
  Quasi-synthetic sequence derived from human genome
VKIKRNWRKPRGIDNRVRRRFKGQILMPNIGYGSNKKTKHMLPSGFRKFL

SEQ ID NO: 42362 - protein, 50 aa, Artificial Sequence
  Quasi-synthetic sequence derived from human genome
FRKRDKVMFYGRKIMRKVTTLPNTLVENTALPRQRARKRTKVLSLAKRIL

SEQ ID NO: 42363 - protein, 50 aa, Artificial Sequence
  Quasi-synthetic sequence derived from human genome
KRDKVMFYGRKIMRKVTTLPNTLVENTALPRQRARKRTKVLSLAKRILRF

SEQ ID NO: 42364 - protein, 50 aa, Artificial Sequence
  Quasi-synthetic sequence derived from human genome
KIVKSIVEKKPRTFIIKLIKWLMIAIPATFVNSAIRYLECKLALAFRTRL

SEQ ID NO: 42365 - protein, 50 aa, Artificial Sequence
  Quasi-synthetic sequence derived from human genome
RGHLLGRLAAIVAKQVLLGRKVVVVRCEGINISGNFYRNKLKYLAFLRKR

SEQ ID NO: 42366 - protein, 50 aa, Artificial Sequence
  Quasi-synthetic sequence derived from human genome
RHPLFIWLKMRISKLVPWMILGSLLYVSMICVFHSKYAGFMVPYFLRKFF

SEQ ID NO: 42367 - protein, 50 aa, Artificial Sequence
  Quasi-synthetic sequence derived from human genome
MMAQILRSHLIKATVIPNRVKMLPYFGIIRNRMMSTHKSKKKIREYYRLL

SEQ ID NO: 42368 - protein, 50 aa, Artificial Sequence
  Quasi-synthetic sequence derived from human genome
APRGSRRPGRTPKWRLPRISARAPYRLRRLRRHTYWPPRRPVAASRCWPV

SEQ ID NO: 42369 - protein, 50 aa, Artificial Sequence
  Quasi-synthetic sequence derived from human genome
KCIRAKIQDYHILTRKRIRYRFRRFIQQFSQCKATARNLKLKYLINLETL

SEQ ID NO: 42370 - protein, 50 aa, Artificial Sequence
  Quasi-synthetic sequence derived from human genome
LAIQISKDGLPGRVPLWVILLSAFAGLLLLMLLILALWKIGFFKRPLKKK

SEQ ID NO: 42371 - protein, 50 aa, Artificial Sequence
  Quasi-synthetic sequence derived from human genome
YLTLLFATSIAGPGLLIGLLYARLARAYRRSQRASFKRARRPGARALRLV

SEQ ID NO: 42372 - protein, 50 aa, Artificial Sequence
  Quasi-synthetic sequence derived from human genome
WPFQRALCLLCFYLKYLNMYASICFLTCISLQRCFFLLKPFRARDWKRRY

SEQ ID NO: 42373 - protein, 50 aa, Artificial Sequence
  Quasi-synthetic sequence derived from human genome
SKPIVHARKKYRFHKTRSHVTHRTTKVKKSPKVRKKSYLSRLMLANRLPF

SEQ ID NO: 42374 - protein, 50 aa, Artificial Sequence
  Quasi-synthetic sequence derived from human genome
ARGQLMRIEFKKIVERRDALLVIQWNIRAFMGVKNWPWMKLYFKIKPLLK

SEQ ID NO: 42375 - protein, 50 aa, Artificial Sequence
  Quasi-synthetic sequence derived from human genome
AIIIQRKWRAILPAKIAHEHFLMIKRHRAACLIQAHYRGYKGRQVFLRQK

SEQ ID NO: 42376 - protein, 50 aa, Artificial Sequence
  Quasi-synthetic sequence derived from human genome
RISITFFRLFRVMRLVKLLSRGEGIRTLLWTFIKSFQALPYVALLIVMLF

SEQ ID NO: 42377 - protein, 50 aa, Artificial Sequence
  Quasi-synthetic sequence derived from human genome
KVFQCGKYLKVFYKFLNSNRHTIRHTGKKCFKCKKCVKSFCIRLHKTQHK

SEQ ID NO: 42378 - protein, 50 aa, Artificial Sequence
  Quasi-synthetic sequence derived from human genome
GNFYRNKLKYLAFLRKRMNTNPSRGPYHFRAPSRIFWRTVRGMLPHKTKR

SEQ ID NO: 42379 - protein, 50 aa, Artificial Sequence
  Quasi-synthetic sequence derived from human genome
HSTLPQHARTPLIAAGVIGGLFILVIVGLTFAVYVRRKSIKKKRALRRFL

SEQ ID NO: 42380 - protein, 50 aa, Artificial Sequence
  Quasi-synthetic sequence derived from human genome
LSIFYLLKIVNFSRLIFHHLKRKAKSVVLVIVLGSLFFLVCHLVMKHTYI

SEQ ID NO: 42381 - protein, 50 aa, Artificial Sequence
  Quasi-synthetic sequence derived from human genome
RWLQKVARSLALALLCLVLSTCVGPYLFPYFIPLNGDRLLRNKKRKARWL

SEQ ID NO: 42382 - protein, 50 aa, Artificial Sequence
  Quasi-synthetic sequence derived from human genome
IFWINFLIVIVCYTLITKELYRSYVRTRGVGKVPRKKVNVKVFIIIAVFF

SEQ ID NO: 42383 - protein, 50 aa, Artificial Sequence
  Quasi-synthetic sequence derived from human genome
KLIRMGPQERWLLRTKRLHWSRLLFLLGMLIIGSTYQHLRRPRGLSSLWA

SEQ ID NO: 42384 - protein, 50 aa, Artificial Sequence
  Quasi-synthetic sequence derived from human genome
YMQMRESCIKLQAFVRGYLVRKQMRLQRKAVISLQSYFRMRKARQYYLKM

SEQ ID NO: 42385 - protein, 50 aa, Artificial Sequence
  Quasi-synthetic sequence derived from human genome
RKLRASITPGTILIILTGRHRGKRVVFLKQLASGLLLVTGPLVLNRVPLR

SEQ ID NO: 42386 - protein, 50 aa, Artificial Sequence
  Quasi-synthetic sequence derived from human genome
ILKAVKVLQASFRGVRVRRTLRKMQTAATLIQSNYRRYRQQTYFNKLKKI

SEQ ID NO: 42387 - protein, 50 aa, Artificial Sequence
  Quasi-synthetic sequence derived from human genome
LLKIANFSNLIFLRLKRRVKSVILVVLLGPLLFLACHLFVVNMNQIVWTK

SEQ ID NO: 42388 - protein, 50 aa, Artificial Sequence
  Quasi-synthetic sequence derived from human genome
WRRKKKSRMTFFVTQLAITEKQARVLIVIAWSLSFLFSIPTLIIFGKRTL

SEQ ID NO: 42389 - protein, 50 aa, Artificial Sequence
  Quasi-synthetic sequence derived from human genome
KRWREELKRTGAPGAFHRWKVVLLVRTDKRSDSLIRKKFRMMKIPKPILF

SEQ ID NO: 42390 - protein, 50 aa, Artificial Sequence
  Quasi-synthetic sequence derived from human genome
RFLLYFSCSLFTAALWGALAALFCLQYLGVRVLLRFQRKLSVLLLLLGRR

SEQ ID NO: 42391 - protein, 50 aa, Artificial Sequence
  Quasi-synthetic sequence derived from human genome
IVGTVLSDIIQKYFFSPTLFRVIRLARIGRILRLIRGAKGIRTLLFALMM

SEQ ID NO: 42392 - protein, 50 aa, Artificial Sequence
  Quasi-synthetic sequence derived from human genome
IVGLALSDLIQKYFVSPTLFRVIRLARIGRVLRLIRGAKGIRTLLFALMM

SEQ ID NO: 42393 - protein, 50 aa, Artificial Sequence
  Quasi-synthetic sequence derived from human genome
CRGFLMRVEYQKMLQRREALFCIQYNVRAFMNVKHWPWMKLFFKIKPLLK

SEQ ID NO: 42394 - protein, 50 aa, Artificial Sequence
  Quasi-synthetic sequence derived from human genome
RIKIFFALAPVFSTKYLKSPLIRMTYKWKSIVMAFSGNKDFLPKTSFKKF

SEQ ID NO: 42395 - protein, 50 aa, Artificial Sequence
  Quasi-synthetic sequence derived from human genome
ICLRPPRPGLRRQWKCVQRRCLRHLAHRLRRRHQRCQRRTPLAVAPPTGK

SEQ ID NO: 42396 - protein, 50 aa, Artificial Sequence
  Quasi-synthetic sequence derived from human genome
RKAIIIFVPVPQLKSFQKIQVRLVRELEKKFSGKHVVFIAQRRILPKPTR

SEQ ID NO: 42397 - protein, 50 aa, Artificial Sequence
  Quasi-synthetic sequence derived from human genome
LRTLRAVRVLRPLKLVSGIPSLQVVLKSIMKAMVPLLQIGLLLFFAILMF

SEQ ID NO: 42398 - protein, 50 aa, Artificial Sequence
  Quasi-synthetic sequence derived from human genome
KLHAPWEVLGRYAEQMNVRMPFRRKIYYLPRRYKFMSRIDKQISRFRRWL

SEQ ID NO: 42399 - protein, 50 aa, Artificial Sequence
  Quasi-synthetic sequence derived from human genome
LRALRFLSVISIVDPWIFIIFRSPVFRIFFHKIFIRPLRYRSRCSNSTNM

SEQ ID NO: 42400 - protein, 50 aa, Artificial Sequence
  Quasi-synthetic sequence derived from human genome
PWVYLLLRKILLRKFCQMRKRRLREQAPLLPTPTVIDPSRFCAQPFRWFL

SEQ ID NO: 42401 - protein, 50 aa, Artificial Sequence
  Quasi-synthetic sequence derived from human genome
APRALLPQWPRRPGRRWPASPLGMKVFRRKALVLCAGYALLLVLTMLNLL

SEQ ID NO: 42402 - protein, 50 aa, Artificial Sequence
  Quasi-synthetic sequence derived from human genome
IAIAWLLYCHKTRLKKILKESRQRHLENFRIRAKHLAANWNRIRTSRRTI

SEQ ID NO: 42403 - protein, 50 aa, Artificial Sequence
  Quasi-synthetic sequence derived from human genome
QMKATGKLYACKKLNKKRLKKRKGYQGAMVEKKILMKVHSRFIVSLAYAF

SEQ ID NO: 42404 - protein, 50 aa, Artificial Sequence
  Quasi-synthetic sequence derived from human genome
FISLTQTMKLLKLRRNIVKLSLYRHFTNTLILAVAASIVFIIWTTMKFRI

SEQ ID NO: 42405 - protein, 50 aa, Artificial Sequence
  Quasi-synthetic sequence derived from human genome
RTRSRRLTFRKNISKASRSSEKSLALLKTVIIVLSVFIACWAPLFILLLL

SEQ ID NO: 42406 - protein, 50 aa, Artificial Sequence
  Quasi-synthetic sequence derived from human genome
KRRMSVGQQTWALLCKNCLKKWRMKRQTLLEWLFSFLLVLFLYLFFSNLH

SEQ ID NO: 42407 - protein, 50 aa, Artificial Sequence
  Quasi-synthetic sequence derived from human genome
RKLLIQAAIVRIMKMRKVLKHQQLLGEVLTQLSSRFKPRVPVIKKCIDIL

SEQ ID NO: 42408 - protein, 50 aa, Artificial Sequence
  Quasi-synthetic sequence derived from human genome
VRSLLSPGLLPHLLPALGFKNKTVLKKRCKDCYLVKRRGRWYVYCKTHPR

SEQ ID NO: 42409 - protein, 50 aa, Artificial Sequence
  Quasi-synthetic sequence derived from human genome
KKLRPHLAKVLVYELLLGKGFRGGGGRWKALLGRHQARLKAELARLKVHR

SEQ ID NO: 42410 - protein, 50 aa, Artificial Sequence
  Quasi-synthetic sequence derived from human genome
FLRHVPLRRIHLFTLVQILCLAVLWILKSTVAAIIFPVMILGLIIVRRLL

SEQ ID NO: 42411 - protein, 50 aa, Artificial Sequence
  Quasi-synthetic sequence derived from human genome
KTNRIARILAGSKKKICTKKPRFMSACAQLVIAFILICIQLGIIVALFIM

SEQ ID NO: 42412 - protein, 50 aa, Artificial Sequence
  Quasi-synthetic sequence derived from human genome
KGKDINTIKSLRVLRVLRPLKTIKRLPKLKAVFDCVVNSLKNVFNILIVY

SEQ ID NO: 42413 - protein, 50 aa, Artificial Sequence
  Quasi-synthetic sequence derived from human genome
ARRAKRKVTRMILIVAALFCLCWMPHHALILCVWFGQFPLTRATYALRIL

SEQ ID NO: 42414 - protein, 50 aa, Artificial Sequence
  Quasi-synthetic sequence derived from human genome
DLLRKVRAKETRKRALSRLKLKLNKDIVISVGIYNLVQKALKPPPIKLYR

SEQ ID NO: 42415 - protein, 50 aa, Artificial Sequence
  Quasi-synthetic sequence derived from human genome
FLNPFKKIKDHLLLIKKVTWTMNGLMLPTDIKRRKTKPVLSIRMKKLTER

SEQ ID NO: 42416 - protein, 50 aa, Artificial Sequence
  Quasi-synthetic sequence derived from human genome
KVKRIGPHIEIFQVFRERKKFMITPKLIRMVTVMQAHVRGWLERKRLQRV

SEQ ID NO: 42417 - protein, 50 aa, Artificial Sequence
  Quasi-synthetic sequence derived from human genome
CRGFLMRVEFQKMVQRRESIFCIQYNIRSFMNVKHWPWMKLFFKIKPLLK

SEQ ID NO: 42418 - protein, 50 aa, Artificial Sequence
  Quasi-synthetic sequence derived from human genome
FRPGTSFGISVLRALRLLRIFKITKYWASLRNLVVSLMSSMKSIISLLFL

SEQ ID NO: 42419 - protein, 50 aa, Artificial Sequence
  Quasi-synthetic sequence derived from human genome
MRRTRRPRFVLMNKMDDLNLHYRFLNWRRRIREIREVRAFRYQERFKHIL

SEQ ID NO: 42420 - protein, 50 aa, Artificial Sequence
  Quasi-synthetic sequence derived from human genome
KRRKSNPKPLVLSEARKQLMIYRLPQVLRLHLKRFRWSGRNHREKIGVHV

SEQ ID NO: 42421 - protein, 50 aa, Artificial Sequence
  Quasi-synthetic sequence derived from human genome
LAKINLLFVAIFTGTVLSDIIQKYFFSPTLFRVIRLARIGRILRLIRGAK

SEQ ID NO: 42422 - protein, 50 aa, Artificial Sequence
  Quasi-synthetic sequence derived from human genome
CIPRSFRRHIRQHSALTRLRLRNVFRRFLRDFQPGRLSQQMVMVKYLATL

SEQ ID NO: 42423 - protein, 50 aa, Artificial Sequence
  Quasi-synthetic sequence derived from human genome
YFVKLRPDNLALIQLTVIMGYLRIIRFLPLFKIIVPILIRIADVQIKKRL

SEQ ID NO: 42424 - protein, 50 aa, Artificial Sequence
  Quasi-synthetic sequence derived from human genome
FLLSVWRPEEGRRSLRPCSVLVSLLQKPRHRCRKRKPLLAIGFYLYRMNK

SEQ ID NO: 42425 - protein, 50 aa, Artificial Sequence
  Quasi-synthetic sequence derived from human genome
LLIVGKMRAVALRAGWQQRRRSEKKITRLVLMVVVVFVLCWMPFYVVQLL

SEQ ID NO: 42426 - protein, 50 aa, Artificial Sequence
  Quasi-synthetic sequence derived from human genome
AVHRLRVQQAALRAARLRHQELFRLRGIKAQVALRLAELARRQRRRQARR

SEQ ID NO: 42427 - protein, 50 aa, Artificial Sequence
  Quasi-synthetic sequence derived from human genome
LKAKKAQLMQYLSLPKTPKMLKMSKGLDARSKRWLKIIWRRHGIWPLENI

SEQ ID NO: 42428 - protein, 50 aa, Artificial Sequence
  Quasi-synthetic sequence derived from human genome
LLVMAICYTGIIKTLLRCPSKKKYKAIRLIFVIMAVFFIFWTPYNVAILL

SEQ ID NO: 42429 - protein, 50 aa, Artificial Sequence
  Quasi-synthetic sequence derived from human genome
LLVGVSFLVLQRRRLPPVRPHGPGPARGRPPHPALPHRRRLHGRPVRRLF

SEQ ID NO: 42430 - protein, 50 aa, Artificial Sequence
  Quasi-synthetic sequence derived from human genome
VLKTLTKPVTLSRSKINKTKVLKMIFVHLIIFCFCFVPYNINLILYSLVR

SEQ ID NO: 42431 - protein, 50 aa, Artificial Sequence
  Quasi-synthetic sequence derived from human genome
VIQKAVRHFLLRKKQEKFTSGIIKIQALWRGYSWRKKNDCTKIKAIRLSL

SEQ ID NO: 42432 - protein, 50 aa, Artificial Sequence
  Quasi-synthetic sequence derived from human genome
LLVLLALAAWASRWLRRKLRARRKGGAPVHVRHMYSTRRPLRSMGTGVSA

SEQ ID NO: 42433 - protein, 50 aa, Artificial Sequence
  Quasi-synthetic sequence derived from human genome
RCWRAHKEYLAILKAVKIIQGCFYTKLERTRFLNVRASAIIIQRKWRAIL

SEQ ID NO: 42434 - protein, 50 aa, Artificial Sequence
  Quasi-synthetic sequence derived from human genome
IRAARLIQTTWRKYKLKTDLKRHQEREKAARIIQLAVINFLAKQRLRKRV

SEQ ID NO: 42435 - protein, 50 aa, Artificial Sequence
  Quasi-synthetic sequence derived from human genome
RLLPRNTFSRKAFKLKKPSKYCSWKCAALSAIAAALLLAILLAYFIAMHL

SEQ ID NO: 42436 - protein, 50 aa, Artificial Sequence
  Quasi-synthetic sequence derived from human genome
RRLRAYLAFLFVREPFERLASAYRNKLARPYSAAFQRRYGARIVQRLRPR

SEQ ID NO: 42437 - protein, 50 aa, Artificial Sequence
  Quasi-synthetic sequence derived from human genome
FYALLFVFIYVQLWLVLRYRHKRLSYQSVFLFLCLFWASLRTVLFSFYFK

SEQ ID NO: 42438 - protein, 50 aa, Artificial Sequence
  Quasi-synthetic sequence derived from human genome
CRGFLMRVEFRKMMERRESIFCIQYNIRAFMNVKHWPWMKLYFKIKPLLK

SEQ ID NO: 42439 - protein, 50 aa, Artificial Sequence
  Quasi-synthetic sequence derived from human genome
FRQWRQQLAARRQEQRATVRALWFWAFSLQAKVWATWLAFVLERRRKKAR

SEQ ID NO: 42440 - protein, 50 aa, Artificial Sequence
  Quasi-synthetic sequence derived from human genome
LTLLIPYLLGRKRRWSKCKIRVFVGGQINRMDQERKAIISLLSKFRLGFH

SEQ ID NO: 42441 - protein, 50 aa, Artificial Sequence
  Quasi-synthetic sequence derived from human genome
LLFSQYARNVKFPLPIYKSKKGWTAYKLQLFKMFPIILAILVSWLLCFIF

SEQ ID NO: 42442 - protein, 50 aa, Artificial Sequence
  Quasi-synthetic sequence derived from human genome
LIIQKHWRGYRERKNFHQQRQSLIEYKAAVTLQRAALKFLAKCRKKKKLF

SEQ ID NO: 42443 - protein, 50 aa, Artificial Sequence
  Quasi-synthetic sequence derived from human genome
GFAGLLAILLVVAVFCILWNWNKRKKRQVPYLRVTVMPLLTLPQTRQRAK

SEQ ID NO: 42444 - protein, 50 aa, Artificial Sequence
  Quasi-synthetic sequence derived from human genome
RKLNDLVKRARLVRVHAYIISYLKKEMPSVFGKENKKKQLILKLPVIFAK

SEQ ID NO: 42445 - protein, 50 aa, Artificial Sequence
  Quasi-synthetic sequence derived from human genome
GRRPSPYWRLTWRVVSPLLLTIFVAYIILLFWKPLRYKAWNPKYELFPSR

SEQ ID NO: 42446 - protein, 50 aa, Artificial Sequence
  Quasi-synthetic sequence derived from human genome
RISSAFFRLFRVMRLIKLLSRAEGVRTLLWTFIKSFQALPYVALLIVMLF

SEQ ID NO: 42447 - protein, 50 aa, Artificial Sequence
  Quasi-synthetic sequence derived from human genome
VTFRNPVIERIPRLRRQKKIFSKQQGKAFQRARQMNIDVATWVRLLRRLI

SEQ ID NO: 42448 - protein, 50 aa, Artificial Sequence
  Quasi-synthetic sequence derived from human genome
FYLLASVLLSLLLILKAGRRWNKYFKSRRPLFTGGLIGGLFTYVLFWTFL

SEQ ID NO: 42449 - protein, 50 aa, Artificial Sequence
  Quasi-synthetic sequence derived from human genome
RYFSITRPLTYRAKRTPKRAGIMIGLAWLISFILWAPAILCWQYLVGKRT

SEQ ID NO: 42450 - protein, 50 aa, Artificial Sequence
  Quasi-synthetic sequence derived from human genome
KAAKDVLGFLRVVRFVRILRIFKLTRHFVGLRVLGHTLRASTNEFLLLII

SEQ ID NO: 42451 - protein, 50 aa, Artificial Sequence
  Quasi-synthetic sequence derived from human genome
LKSLKKQMKKVKKMTVKDMVTAFFSSYWSIFMTLLHFVASVFRGFFRIIC

SEQ ID NO: 42452 - protein, 50 aa, Artificial Sequence
  Quasi-synthetic sequence derived from human genome
RRKCKPQMNYDKLSRALRYYYNKRILHKTKGKRFTYKFNFNKLVMPNYPF

SEQ ID NO: 42453 - protein, 50 aa, Artificial Sequence
  Quasi-synthetic sequence derived from human genome
KNNRQKVSGILQRVLLLFRAAQCSFPVAQWYILQLRWARKVMQKIRMKGS

SEQ ID NO: 42454 - protein, 50 aa, Artificial Sequence
  Quasi-synthetic sequence derived from human genome
RIQIWAELAKVARKQGVWDVCRTASRFCLLYDNVKVKKLRLRRGKKKRGR

SEQ ID NO: 42455 - protein, 50 aa, Artificial Sequence
  Quasi-synthetic sequence derived from human genome
LQMVLQRRKFLQMKRRKYGFIYKTHLFGRPTVRVMGADNVRRILLGEHRL

SEQ ID NO: 42456 - protein, 50 aa, Artificial Sequence
  Quasi-synthetic sequence derived from human genome
WRVFSLFSYVLIYLFSKYLAFNTLFALKRMALQRDRKEKTRAWCIFIKLC

SEQ ID NO: 42457 - protein, 50 aa, Artificial Sequence
  Quasi-synthetic sequence derived from human genome
IFQCNKYVKVFHKYSNSNRYKIRHTKKKTFKCMKCSKSFFMLSHLIQHKR

SEQ ID NO: 42458 - protein, 50 aa, Artificial Sequence
  Quasi-synthetic sequence derived from human genome
RYKYKLMRQIRMCKDLKHLIYYRFNTGPVGKGPGCGFWAAGWRVWLFFMR

SEQ ID NO: 42459 - protein, 50 aa, Artificial Sequence
  Quasi-synthetic sequence derived from human genome
FLHQLQLLLWKNVTLKRRSPWVLAFEIFIPLVLFFILLGLRQKKPTISVK

SEQ ID NO: 42460 - protein, 50 aa, Artificial Sequence
  Quasi-synthetic sequence derived from human genome
LLLLAFLQRRQRRRQDSRVVARSVRILVASFFLCWFPNHVVTLWGVLVKF

SEQ ID NO: 42461 - protein, 50 aa, Artificial Sequence
  Quasi-synthetic sequence derived from human genome
AMKGKKPSFMVIRFPGRRGYGRLRPRARSLSKASTAINWLTKKFLLKKAE

SEQ ID NO: 42462 - protein, 50 aa, Artificial Sequence
  Quasi-synthetic sequence derived from human genome
RPFQCCFCQKGFKIQSKLLKHKQIHTRNKAFRALLLKKRRTESRPLPNKL

SEQ ID NO: 42463 - protein, 50 aa, Artificial Sequence
  Quasi-synthetic sequence derived from human genome
LLFHQVRKYLLRLDVRKDHVKFWRPQLLLLVGNPRGALPLLRLANQLKKG

SEQ ID NO: 42464 - protein, 50 aa, Artificial Sequence
  Quasi-synthetic sequence derived from human genome
LHSLAFKSYKPEIQNKLLIIKKKAKHKKHKSGKKSVSKKAITKKRKTVIK

SEQ ID NO: 42465 - protein, 50 aa, Artificial Sequence
  Quasi-synthetic sequence derived from human genome
LAQTMKTLRLRKNTVKFSLYRHFKNTLIFAVLASIVFMGWTTKTFRIAKC

SEQ ID NO: 42466 - protein, 50 aa, Artificial Sequence
  Quasi-synthetic sequence derived from human genome
ALSTIVSQRKQIKRKAPRGFLKRVFKRKKPQLRLEKSGDLLVRFHPFSGW

SEQ ID NO: 42467 - protein, 50 aa, Artificial Sequence
  Quasi-synthetic sequence derived from human genome
RRKAAKRKWAAQTIRRLIRGFVLRHAPRCPENAFFLDHVRTSFLLNLRRQ

SEQ ID NO: 42468 - protein, 50 aa, Artificial Sequence
  Quasi-synthetic sequence derived from human genome
LLVLGLLLTEIVRSWSLALTWALNYRTGVRLRGAILTMAFKKILKLKNIK

SEQ ID NO: 42469 - protein, 50 aa, Artificial Sequence
  Quasi-synthetic sequence derived from human genome
WHWQKKVINKGLFFLGSLIAISSTYLLIHYMSPRSFLRLRRPWNWIAHFR

SEQ ID NO: 42470 - protein, 50 aa, Artificial Sequence
  Quasi-synthetic sequence derived from human genome
KRVGRRHYCLVEHPQRSKKAVWHKLLSKQRKRAVVACFRMAPLYNLPRHR

SEQ ID NO: 42471 - protein, 50 aa, Artificial Sequence
  Quasi-synthetic sequence derived from human genome
LFAFISLLVMLPTWWIVSSWLVWGVILFVYLVIRALRLWRTAKLQVTLKK

SEQ ID NO: 42472 - protein, 50 aa, Artificial Sequence
  Quasi-synthetic sequence derived from human genome
RWKYIQQVYLASFWLAMSSTMYNPIIYCCLNKRFRAGFKRAFRWCPFIKV

SEQ ID NO: 42473 - protein, 50 aa, Artificial Sequence
  Quasi-synthetic sequence derived from human genome
FAAKLWSFFIYLLRRQIRTVIQYQTVRYDILPLSPVSRNRLAQVKRKILV

SEQ ID NO: 42474 - protein, 50 aa, Artificial Sequence
  Quasi-synthetic sequence derived from human genome
KVMLKSIKTRLGRRVPAAPPALRRNLLLQAWKCVCNWASRLFAPNVLPRT

SEQ ID NO: 42475 - protein, 50 aa, Artificial Sequence
  Quasi-synthetic sequence derived from human genome
YNIQKESTLHLVLRLRGGAKKRKKKSYTTPKKNKHKRKKVKLAVLKYYKV

SEQ ID NO: 42476 - protein, 50 aa, Artificial Sequence
  Quasi-synthetic sequence derived from human genome
LIQKYYRSYKKCGKRRQARRTAVIVQQKLRSSLLTKKQDQAARKIMRFLR

SEQ ID NO: 42477 - protein, 50 aa, Artificial Sequence
  Quasi-synthetic sequence derived from human genome
SRGVLARMEYKKLLERRDSLLVIQWNIRAFMGVKNWPWMKLYFKIKPLLK

SEQ ID NO: 42478 - protein, 50 aa, Artificial Sequence
  Quasi-synthetic sequence derived from human genome
RVLRSLKLLAQFRQIQIIILVLVRALKSMTFLLMLLLIFFYIFAVTGVYV

SEQ ID NO: 42479 - protein, 50 aa, Artificial Sequence
  Quasi-synthetic sequence derived from human genome
IFLFSFIVPVLVISVCYSLMIRRLRGVRLLSGSREKDRNLRRITRLVLVV

SEQ ID NO: 42480 - protein, 50 aa, Artificial Sequence
  Quasi-synthetic sequence derived from human genome
MRRQMRRHASRRGPSRRRLGRLWNRLFHRPRAPRGQIPLLTAARPSQTVL

SEQ ID NO: 42481 - protein, 50 aa, Artificial Sequence
  Quasi-synthetic sequence derived from human genome
ARIIWSLRQRQMDRHAKIKRAITFIMVVAIVFVICFLPSVVVRIHIFWLL

SEQ ID NO: 42482 - protein, 50 aa, Artificial Sequence
  Quasi-synthetic sequence derived from human genome
RSFALLLPVYALGYLGLSFSWVLLALALLAWCRRSRGLKALRLCRALALL

SEQ ID NO: 42483 - protein, 50 aa, Artificial Sequence
  Quasi-synthetic sequence derived from human genome
AVRIQRAYKLYLAVKNANKQVNSVICIQRWFRARLQEKRFIQKYHSIKKI

SEQ ID NO: 42484 - protein, 50 aa, Artificial Sequence
  Quasi-synthetic sequence derived from human genome
ILCLGPSDLLVKLRLCFLVMAYGTTIFHPLLYAFTRQKFQKVLKSKMKKR

SEQ ID NO: 42485 - protein, 50 aa, Artificial Sequence
  Quasi-synthetic sequence derived from human genome
AHKRMKVKKLPMILALHLKRFKYMDQLHRYTKLSYRVVFPLELRLFNTSG

SEQ ID NO: 42486 - protein, 50 aa, Artificial Sequence
  Quasi-synthetic sequence derived from human genome
KVLLAKRKLDGKFYAVKVLQKKIVLNRKEQKHIMAERNVLLKNVKHPFLV

SEQ ID NO: 42487 - protein, 50 aa, Artificial Sequence
  Quasi-synthetic sequence derived from human genome
STVLPLYHKHYILFCTTVFTLLLLSIVILYCRIYSLVRTRSRRLTFRKNI

SEQ ID NO: 42488 - protein, 50 aa, Artificial Sequence
  Quasi-synthetic sequence derived from human genome
KLFAIIVGRGIRKWWQALPPNKKEVVKENIRKNKWKLFLGLSSFGLLFVV

SEQ ID NO: 42489 - protein, 50 aa, Artificial Sequence
  Quasi-synthetic sequence derived from human genome
NVVSRRNVNQTRLKRVLSGATLPDKLRDKLKLMKQRRKPPGFLALVKLLR

SEQ ID NO: 42490 - protein, 50 aa, Artificial Sequence
  Quasi-synthetic sequence derived from human genome
CIARKLCAHYQQSGKHNKKLKKSIKIIFIVVAAFLVSWLPFNTFKFLAIV

SEQ ID NO: 42491 - protein, 50 aa, Artificial Sequence
  Quasi-synthetic sequence derived from human genome
VCPGRLRGVRAVRPKVLMRLSKTKKHVSRAYGGSMCAKCVRDRIKRAFLI

SEQ ID NO: 42492 - protein, 50 aa, Artificial Sequence
  Quasi-synthetic sequence derived from human genome
LLKIANFSNLIFLHLKRRVKSVILVMLLGPLLFLACQLFVINMKEIVRTK

SEQ ID NO: 42493 - protein, 50 aa, Artificial Sequence
  Quasi-synthetic sequence derived from human genome
LILKNKLKVRTAYPSLRLIHAVRGYWLTNKVPIKRPSTGLLMYTLATRFC

SEQ ID NO: 42494 - protein, 50 aa, Artificial Sequence
  Quasi-synthetic sequence derived from human genome
LRCIRLLRIFKITKYWTSLSNLVASLLNSIRSIASLLLLLFLFIVIFALL

SEQ ID NO: 42495 - protein, 50 aa, Artificial Sequence
  Quasi-synthetic sequence derived from human genome
QRAGITAAINLAKLKLFRHYYVLIVCYIYFTRIIAFLLKLAVPFQWKWLY

SEQ ID NO: 42496 - protein, 50 aa, Artificial Sequence
  Quasi-synthetic sequence derived from human genome
MSWWRNNFWIILAVAIIVVSVGLGLILYCVCKWQLRRGKKWEIAKPLKHK

SEQ ID NO: 42497 - protein, 50 aa, Artificial Sequence
  Quasi-synthetic sequence derived from human genome
RRRKKKERRPRGTMQAINNERKASKVLGIVFFVFLIMWCPFFITNILSVL

SEQ ID NO: 42498 - protein, 50 aa, Artificial Sequence
  Quasi-synthetic sequence derived from human genome
FIKVLLYMAFMTIMIKVHTFPLFAIRPMYLAMRQFKKAVTDAIMSRRAIR

SEQ ID NO: 42499 - protein, 50 aa, Artificial Sequence
  Quasi-synthetic sequence derived from human genome
KKTFIVLNKGKAIFRFSATPALYLLSPFSVVRRGAIKVLIHALFSMFIMI

SEQ ID NO: 42500 - protein, 50 aa, Artificial Sequence
  Quasi-synthetic sequence derived from human genome
WLNNLPAKASRSKTRLKSQLLLQKYIAQRKWKKHFYVVTAANRLRKFPTS

SEQ ID NO: 42501 - protein, 50 aa, Artificial Sequence
  Quasi-synthetic sequence derived from human genome
RLVALKKFVAVLAKYFPGRPLVQNFLHSVNEWLKRQKRNKIPYSFFKTAL

SEQ ID NO: 42502 - protein, 50 aa, Artificial Sequence
  Quasi-synthetic sequence derived from human genome
RKWRAILPAKIAHEHFLMIKRHRAACLIQAHYRGYKGRQVFLRQKSAALI

SEQ ID NO: 42503 - protein, 50 aa, Artificial Sequence
  Quasi-synthetic sequence derived from human genome
RYLALVHPLRARALRGRRLALGLCMAAWLMAAALALPLTLQRQTFRLARS

SEQ ID NO: 42504 - protein, 50 aa, Artificial Sequence
  Quasi-synthetic sequence derived from human genome
LKRAASAIYRLFDYRGRLSPVPVPRAVPVKRPRVTVPLVRRVKTNVPVKL

SEQ ID NO: 42505 - protein, 50 aa, Artificial Sequence
  Quasi-synthetic sequence derived from human genome
PSANYHALYRYFVELWIYLGLAWLSLFVNWKVSMFVEVHKAIKKRRRRRK

SEQ ID NO: 42506 - protein, 50 aa, Artificial Sequence
  Quasi-synthetic sequence derived from human genome
AAHNLTWIQYHSLDVIAFLLACVATVIFIITKFCLFCFRKLAKKGKKKKR

SEQ ID NO: 42507 - protein, 50 aa, Artificial Sequence
  Quasi-synthetic sequence derived from human genome
KNGKFLYFLRSRVPGLPPTPVQLLYPVSRFSNVKSLQHLCRFRIRQLVRI

SEQ ID NO: 42508 - protein, 50 aa, Artificial Sequence
  Quasi-synthetic sequence derived from human genome
PLLVICLCYLLIVVKVRAAGVRVGCVRRRSERKVTRMVLVVVLVFAGCWL

SEQ ID NO: 42509 - protein, 50 aa, Artificial Sequence
  Quasi-synthetic sequence derived from human genome
IAVDRYLRVKLTVRYKRVTTHRRIWLALGLCWLVSFLVGLTPMFGWNMKL

SEQ ID NO: 42510 - protein, 50 aa, Artificial Sequence
  Quasi-synthetic sequence derived from human genome
CRISRRLRRPPHVGRARRNSLRIIFAIESTFVGSWLPFSALRAVFHLARL

SEQ ID NO: 42511 - protein, 50 aa, Artificial Sequence
  Quasi-synthetic sequence derived from human genome
MGFVRQIQLLLWKNWTLRKRQKIRFVVELVWPLSLFLVLIWLRNANPLYS

SEQ ID NO: 42512 - protein, 50 aa, Artificial Sequence
  Quasi-synthetic sequence derived from human genome
ISYHTQHKGRLKHRGSSLHPFRKGLQEKDKVWLLREQKRKKKLRKLLKRL

SEQ ID NO: 42513 - protein, 50 aa, Artificial Sequence
  Quasi-synthetic sequence derived from human genome
AQKRMRVKKLPMILALHLKRFKYMEQLHRYTKLSYRVVFPLELRLFNTSS

SEQ ID NO: 42514 - protein, 50 aa, Artificial Sequence
  Quasi-synthetic sequence derived from human genome
ACRGYLARQHFKKRKIQDLAIRCVQKNIKKNKGVKDWPWWKLFTTVRPLI

SEQ ID NO: 42515 - protein, 50 aa, Artificial Sequence
  Quasi-synthetic sequence derived from human genome
KIIQGCFYTKLERTRFLNVRASAIIIQRKWRAILPAKIAHEHFLMIKRHR

SEQ ID NO: 42516 - protein, 50 aa, Artificial Sequence
  Quasi-synthetic sequence derived from human genome
HHKYRKLVKKTRFLRRKVQEGRLRRKQIKFEKDLRRIWLKAGLKEAPEGW

SEQ ID NO: 42517 - protein, 50 aa, Artificial Sequence
  Quasi-synthetic sequence derived from human genome
VLLLGWLFAPVYLTAGVITMPQYLRKRFGGRRIRLYLSVLSLFLYIFTKI

SEQ ID NO: 42518 - protein, 50 aa, Artificial Sequence
  Quasi-synthetic sequence derived from human genome
PSEGVFKVIFWLGYFNSCVNPLIYPCSSREFKRAFLRLLRCQCRRRRRRR

SEQ ID NO: 42519 - protein, 50 aa, Artificial Sequence
  Quasi-synthetic sequence derived from human genome
KRPRCCSWCRRRRPLLRLPRRTPAKVPPQPAAPRSRDCFFRGPCMLCFIV

SEQ ID NO: 42520 - protein, 50 aa, Artificial Sequence
  Quasi-synthetic sequence derived from human genome
VKILRVLRVLRPLRAINRAKGLKHVVQCMFVAISTIGNIVLVTTLLQFMF

SEQ ID NO: 42521 - protein, 50 aa, Artificial Sequence
  Quasi-synthetic sequence derived from human genome
RLRMVWRRKRKPAGRQQPNPLPHLWRRTPQTRRKSLAYAHIFSPNLCFIQ

SEQ ID NO: 42522 - protein, 50 aa, Artificial Sequence
  Quasi-synthetic sequence derived from human genome
RSGKKKMSKLSRSARAGVIFPVGRLMRYLKKGTFKYRISVGAPVYMAAVI

SEQ ID NO: 42523 - protein, 50 aa, Artificial Sequence
  Quasi-synthetic sequence derived from human genome
TRSGGQKLCSRFLLKCGFITIPWRCIKKCSPLMPRAAVPRFVQQKLYLFL

SEQ ID NO: 42524 - protein, 50 aa, Artificial Sequence
  Quasi-synthetic sequence derived from human genome
TICLGVLLGLPLLVIITLLFICCHCCWSPPGKRGQQPEKNKKKKKKKKKK

SEQ ID NO: 42525 - protein, 50 aa, Artificial Sequence
  Quasi-synthetic sequence derived from human genome
KASQCGKYLKVFYKFINLNRYKIRHTRKKPFKCKNCVKSFCMFSHKTQHK

SEQ ID NO: 42526 - protein, 50 aa, Artificial Sequence
  Quasi-synthetic sequence derived from human genome
LKVTVKLKPRLRAVHGGFEDCRPLNKKWRGMKWKKWSIHIVIPKGTFKPP

SEQ ID NO: 42527 - protein, 50 aa, Artificial Sequence
  Quasi-synthetic sequence derived from human genome
IFSYPSTHPFILILGNKKLKQIFLSVLRHVRYWVKDRSLRLHRFTRGALC

SEQ ID NO: 42528 - protein, 50 aa, Artificial Sequence
  Quasi-synthetic sequence derived from human genome
RTHFLLMKKSQIVIAAWYRRYAQQKRYQQTKSSALVIQSYIRGWKARKIL

SEQ ID NO: 42529 - protein, 50 aa, Artificial Sequence
  Quasi-synthetic sequence derived from human genome
GRWRVLRLGAWARWLLVALTAATALVRLAQLGAADRQWTRFVRGRPRRFT

SEQ ID NO: 42530 - protein, 50 aa, Artificial Sequence
  Quasi-synthetic sequence derived from human genome
FKVAVIASIVSCAIILLMSMAFLTCCLLKCVKKSKRRRSNRSAQLWSQLK

SEQ ID NO: 42531 - protein, 50 aa, Artificial Sequence
  Quasi-synthetic sequence derived from human genome
RMKHLKTLPMVPFKTKDSPGVFSKLGVLLRRVTRNLVRNKLAVITRLLQN

SEQ ID NO: 42532 - protein, 50 aa, Artificial Sequence
  Quasi-synthetic sequence derived from human genome
KFFLYVCMYVCIREKILLYKTHWMTPIFLKVVINTRRIKHHFKIHVPSQF

SEQ ID NO: 42533 - protein, 50 aa, Artificial Sequence
  Quasi-synthetic sequence derived from human genome
RYFSITRPLTYRAKRTTKRAGVMIGLAWVISFVLWAPAILFWQYFVGKRT

SEQ ID NO: 42534 - protein, 50 aa, Artificial Sequence
  Quasi-synthetic sequence derived from human genome
KYYRSYKKCGKRRQARRTAVIVQQKLRSSLLTKKQDQAARKIMRFLRRCR

SEQ ID NO: 42535 - protein, 50 aa, Artificial Sequence
  Quasi-synthetic sequence derived from human genome
RKRPLPACPNPLFVRWLTEWRDEATRSRRRTRFVFQKALRSLRRYPLPLR

SEQ ID NO: 42536 - protein, 50 aa, Artificial Sequence
  Quasi-synthetic sequence derived from human genome
KHWMLHFPRITYPLVHLANWLCGLNLFWICKTCFRCLKRLKMSWFLPTVL

SEQ ID NO: 42537 - protein, 50 aa, Artificial Sequence
  Quasi-synthetic sequence derived from human genome
LLYRKAAVVLQNHYRAFLSAKHQRQVYLQIRSSVIIIQARSKGFIQKRKF

SEQ ID NO: 42538 - protein, 50 aa, Artificial Sequence
  Quasi-synthetic sequence derived from human genome
MPRKRKCDLRAVRVGLLLGGGGVYGSRFRFTFPGCRALSPWRVRVQRRRC

SEQ ID NO: 42539 - protein, 50 aa, Artificial Sequence
  Quasi-synthetic sequence derived from human genome
MRPRSGGRPGATGRRRRRLRRRPRGLRCSRLPPPPPLPLLLGLLLAAAGP

SEQ ID NO: 42540 - protein, 50 aa, Artificial Sequence
  Quasi-synthetic sequence derived from human genome
IVARKIVKMTKQPAKKKPPPSREKKVTRTILAILLAFIITWAPYNVMVLI

SEQ ID NO: 42541 - protein, 50 aa, Artificial Sequence
  Quasi-synthetic sequence derived from human genome
WQRRVATWFNQPARKIRRRKARQAKARRIAPRPASGPIRPIVRCPTVRYH

SEQ ID NO: 42542 - protein, 50 aa, Artificial Sequence
  Quasi-synthetic sequence derived from human genome
RRSRWPFSKARSFCKTHASLFKKILLGLLCLAYAAYLLAACILNFQRALA

SEQ ID NO: 42543 - protein, 50 aa, Artificial Sequence
  Quasi-synthetic sequence derived from human genome
FCSGPIYPGHGMMFVRNDCKVFRFCKSKCHKNFKKKRNPRKVRWTKAFRK

SEQ ID NO: 42544 - protein, 50 aa, Artificial Sequence
  Quasi-synthetic sequence derived from human genome
VGVWRQTRTLLLKNYLIKCRTKKSSVQEILFPLFFLFWLILISMMHPNKK

SEQ ID NO: 42545 - protein, 50 aa, Artificial Sequence
  Quasi-synthetic sequence derived from human genome
RLLGAVQKGWIRCNTTIRKSGFGGITMLFTGYFVLCCSWSFRRLKLQRWR

SEQ ID NO: 42546 - protein, 50 aa, Artificial Sequence
  Quasi-synthetic sequence derived from human genome
RFGKHLSPIVHILMADIYLLLPPVLNPIVYSVRTKQIRLGILHKFVLRRR

SEQ ID NO: 42547 - protein, 50 aa, Artificial Sequence
  Quasi-synthetic sequence derived from human genome
PKYWDYRYKKNLKALYVVHPTSFIKVLWNILKPLISHKFGKKVIYFNYLS

SEQ ID NO: 42548 - protein, 50 aa, Artificial Sequence
  Quasi-synthetic sequence derived from human genome
WRRHRHREQERQWRAVMLIQAAIRSWLTRKHIQRLHAAATVIKRAWQKWR

SEQ ID NO: 42549 - protein, 50 aa, Artificial Sequence
  Quasi-synthetic sequence derived from human genome
RLGRRLGRRRRPRSPPEPLRVRARLRLRSPSGAFAALGALVVLVGMGIAV

SEQ ID NO: 42550 - protein, 50 aa, Artificial Sequence
  Quasi-synthetic sequence derived from human genome
WLATSLSMFYLLRIANFSNLIFLRIKRRVKSVVLVILLGPLLFLVCHLFV

SEQ ID NO: 42551 - protein, 50 aa, Artificial Sequence
  Quasi-synthetic sequence derived from human genome
FFIVPSHRRKIFPGLILSDIKPAKRMKFKTVCYLLVQLMHCRKMFKAEIP

SEQ ID NO: 42552 - protein, 50 aa, Artificial Sequence
  Quasi-synthetic sequence derived from human genome
FFQDIGYFLKVAAVGRRVRSYGKRRPARTILRAFLEKARQTPHKPFLLFR

SEQ ID NO: 42553 - protein, 50 aa, Artificial Sequence
  Quasi-synthetic sequence derived from human genome
YIYFIHSLCLLGRLLIYKQGRKLFPIKLKNKKGLVSLIDLLVLFTQLIYY

SEQ ID NO: 42554 - protein, 50 aa, Artificial Sequence
  Quasi-synthetic sequence derived from human genome
LIMVICYSGILKTLLRCRNEKKRHRAVRVIFTIMIVYFLFWTPYNIVILL

SEQ ID NO: 42555 - protein, 50 aa, Artificial Sequence
  Quasi-synthetic sequence derived from human genome
AKRRRMVLEFYVQQEWAAVRLQSWVRMWCVRQRYCRLLNAVRIIQVYWRW

SEQ ID NO: 42556 - protein, 50 aa, Artificial Sequence
  Quasi-synthetic sequence derived from human genome
KLVLMIGDIVTVIFPSSHSFILIMGNSKLREAFLKMLRFVKCFLRRRKPF

SEQ ID NO: 42557 - protein, 50 aa, Artificial Sequence
  Quasi-synthetic sequence derived from human genome
KKVVNPLFEKRPKNFGIGQDIQPKRDLTRFVKWPRYIRLQRQRAILYKRL

SEQ ID NO: 42558 - protein, 50 aa, Artificial Sequence
  Quasi-synthetic sequence derived from human genome
RRKHAVAVIWAYWLGLKVRREYRKFFRANAGKKIYEFTLQRIVQKYFLEM

SEQ ID NO: 42559 - protein, 50 aa, Artificial Sequence
  Quasi-synthetic sequence derived from human genome
RAFILKSKGIKQKQIIPKNLLDSKSLKLIISMTLHDRTTKSLLHLHKKKK

SEQ ID NO: 42560 - protein, 50 aa, Artificial Sequence
  Quasi-synthetic sequence derived from human genome
FGKTKIFIRSPKTLFYLEEQRRLRLQQLATLIQKIYRGWRCRTHYQLMRK

SEQ ID NO: 42561 - protein, 50 aa, Artificial Sequence
  Quasi-synthetic sequence derived from human genome
KKRILFLYNDLLKKRAAFTKLRRAAILRRERQQKAPVFTEPQFLPLKNGK

SEQ ID NO: 42562 - protein, 50 aa, Artificial Sequence
  Quasi-synthetic sequence derived from human genome
LDRSNAPNIPKLNRFLLLFIGFVCVLLSFFMARVFMRMKLPRSLALLPRL

SEQ ID NO: 42563 - protein, 50 aa, Artificial Sequence
  Quasi-synthetic sequence derived from human genome
RAQGKLMRIKFQKILEERDALILIQWNIRAFMAVKNWPWMRLFFKIKPLV

SEQ ID NO: 42564 - protein, 50 aa, Artificial Sequence
  Quasi-synthetic sequence derived from human genome
KRPVGKGRKQPEPLEKPSRPKTSFNWFVNPLKTFVFFIWRRYWRTLVLLL

SEQ ID NO: 42565 - protein, 50 aa, Artificial Sequence
  Quasi-synthetic sequence derived from human genome
IVKDQRARMNAAQCLAHPWLNNLAEKAKRCNRRLKSQILLKKYLMKRRWK

SEQ ID NO: 42566 - protein, 50 aa, Artificial Sequence
  Quasi-synthetic sequence derived from human genome
MSSHKTFKIKQFLAKKQKQNRPIPQWIRMKTGNKIRYNSKRRHWKRTKLG

SEQ ID NO: 42567 - protein, 50 aa, Artificial Sequence
  Quasi-synthetic sequence derived from human genome
RIPLVRNRRFQLCRCMNPRARKNRSQIALFQKLRFQFFCSMSGRAWVSRE

SEQ ID NO: 42568 - protein, 50 aa, Artificial Sequence
  Quasi-synthetic sequence derived from human genome
AKILGVLRVLRLLRTLRPLRVISRAPGLKLVVETLISSLRPIGNIVLICC

SEQ ID NO: 42569 - protein, 50 aa, Artificial Sequence
  Quasi-synthetic sequence derived from human genome
RPAPGRMEWIIPLIVVSALTFVCLILLIAVLVYWRGCNKIKSKGFPRRFR

SEQ ID NO: 42570 - protein, 50 aa, Artificial Sequence
  Quasi-synthetic sequence derived from human genome
TPTISIVSYLFAKSNTVYNPVIYVFMIRKFRRSLLQLLCLRLLRCQRPAK

SEQ ID NO: 42571 - protein, 50 aa, Artificial Sequence
  Quasi-synthetic sequence derived from human genome
PLRRGRPKRRRKPQPHSGSVLALPLRSRKIRKQLRSVVSRMAALRTQTLP

SEQ ID NO: 42572 - protein, 50 aa, Artificial Sequence
  Quasi-synthetic sequence derived from human genome
KVFQCDKYLKVFYKFLNSNRPKIRHTEKKSFKCKKRVKLFCMLSHKTQHK

SEQ ID NO: 42573 - protein, 50 aa, Artificial Sequence
  Quasi-synthetic sequence derived from human genome
RRLVQLLRQHSSPWQVYGFVRACLRRLVPPGLWGSRHNERRFLRNTKKFI

SEQ ID NO: 42574 - protein, 50 aa, Artificial Sequence
  Quasi-synthetic sequence derived from human genome
LRCVRLLRIFKITRYWNSLSNLVASLLNSVRSIASLLLLLFLFIIIFSLL

SEQ ID NO: 42575 - protein, 50 aa, Artificial Sequence
  Quasi-synthetic sequence derived from human genome
MIIVIFCYLRIWILVLQVRQRVKPDRKPKLKPQDFRNFVTMFVVFVLFAI

SEQ ID NO: 42576 - protein, 50 aa, Artificial Sequence
  Quasi-synthetic sequence derived from human genome
LKQVFPKYAKQFNYLRLVDRMANLFIRFLGIKGTMKLGPTGFRTFIRSCK

SEQ ID NO: 42577 - protein, 50 aa, Artificial Sequence
  Quasi-synthetic sequence derived from human genome
VYRGIRVRRHIQHMHRAATFIKAMFKMHQSRISYHTMRKAAIVIQVRCRA

SEQ ID NO: 42578 - protein, 50 aa, Artificial Sequence
  Quasi-synthetic sequence derived from human genome
RRLQTQVFKLGLAKSIHHARVLIRQRHIRVRKQVVNIPSFIVRLDSQKHI

SEQ ID NO: 42579 - protein, 50 aa, Artificial Sequence
  Quasi-synthetic sequence derived from human genome
GRLKTWVYGVAAGAFVLLIFIVSMIYLACKKPKKPQRRQNNRLKPLTLAY

SEQ ID NO: 42580 - protein, 50 aa, Artificial Sequence
  Quasi-synthetic sequence derived from human genome
CHLCGQSFRGWVALVLHLRAHSAAKRPIACPKCERRFWRRKQLRAHLRRC

SEQ ID NO: 42581 - protein, 50 aa, Artificial Sequence
  Quasi-synthetic sequence derived from human genome
IFMVKIFMLLVVGITSGMWIWTSKTLQSWQQVCSRRLKKKSRRKPASVIT

SEQ ID NO: 42582 - protein, 50 aa, Artificial Sequence
  Quasi-synthetic sequence derived from human genome
WALTRQQLQALLLKRFLLARRSRRGLFAQIVLPALFVGLALVFSLIVPPF

SEQ ID NO: 42583 - protein, 50 aa, Artificial Sequence
  Quasi-synthetic sequence derived from human genome
MRKALKVKRPRFDVSLVYLTRKFMDLVRSAPGGILDLNKVATKLGVRKRR

SEQ ID NO: 42584 - protein, 50 aa, Artificial Sequence
  Quasi-synthetic sequence derived from human genome
VVRAVYRVLKNCPSVALKKKAKCLLSKWKAVYKQTHSKARNSPKLFPVRG

SEQ ID NO: 42585 - protein, 50 aa, Artificial Sequence
  Quasi-synthetic sequence derived from human genome
RSRGRLMRLEYQRLLGGRDALFTIQWNIRAFNAVKNWSWMKLFFKMKPLL

SEQ ID NO: 42586 - protein, 50 aa, Artificial Sequence
  Quasi-synthetic sequence derived from human genome
TFFGFHRLLLKWRGSIYKLLYREFIVFAVLYTAISLVYRLLLTGVQKRYF

SEQ ID NO: 42587 - protein, 50 aa, Artificial Sequence
  Quasi-synthetic sequence derived from human genome
PLVRKRRFQLRRCMNPRARKNRSQIVLFQKRRFHFFCSMSCRAWVSPEEL

SEQ ID NO: 42588 - protein, 50 aa, Artificial Sequence
  Quasi-synthetic sequence derived from human genome
RIKNTFNWTVPFLSSLACLILAAATIILYFIPLRYIILIWGINKFTKKLR

SEQ ID NO: 42589 - protein, 50 aa, Artificial Sequence
  Quasi-synthetic sequence derived from human genome
RMYFVFAQMLSSVSTWLAIILLIFISLFPEILLIVLKNVRRRSARVTKRL

SEQ ID NO: 42590 - protein, 50 aa, Artificial Sequence
  Quasi-synthetic sequence derived from human genome
LARRRIRLWHRGAMVIQATWRGYRVRRNLAHLCRATTTIQSAWRGYSTRR

SEQ ID NO: 42591 - protein, 50 aa, Artificial Sequence
  Quasi-synthetic sequence derived from human genome
KSLNASSGHLALILSSIFGLLLLVLFILFLTWCRVQKQKHLPLRVSTRRR

SEQ ID NO: 42592 - protein, 50 aa, Artificial Sequence
  Quasi-synthetic sequence derived from human genome
LKEAWAAIIIQKHCRGYLVRSLYQLIRMATITMQAYSRGFLARRRYRKML

SEQ ID NO: 42593 - protein, 50 aa, Artificial Sequence
  Quasi-synthetic sequence derived from human genome
AALLLLPLLLLLPLLLLKLHLWPQLRWLPADLAFAVRALCCKRALRARAL

SEQ ID NO: 42594 - protein, 50 aa, Artificial Sequence
  Quasi-synthetic sequence derived from human genome
LKSSLIRKPRIVSRGRRPRSQQYSVLFKQLGVNTVRKCYKCNICGKIFLH

SEQ ID NO: 42595 - protein, 50 aa, Artificial Sequence
  Quasi-synthetic sequence derived from human genome
LLLGSWALFFRRPKASLPRVFVLRALLMVLVFLLVVSYWLFYGVRILDAR

SEQ ID NO: 42596 - protein, 50 aa, Artificial Sequence
  Quasi-synthetic sequence derived from human genome
LCCSKLVNYLTPIKYLRKSLKIIYLNSIQELEIRNMSWPRLIRKLRCYLK

SEQ ID NO: 42597 - protein, 50 aa, Artificial Sequence
  Quasi-synthetic sequence derived from human genome
KNIIRTKMFLYLSDLSRKDRRIVSKKYKIYFWNIITIAVFYALPVIQLVI

SEQ ID NO: 42598 - protein, 50 aa, Artificial Sequence
  Quasi-synthetic sequence derived from human genome
FIYLRHVPLRRVHLFTFLQVLCLALLWILKSTVAAIIFPVMILALVAVRK

SEQ ID NO: 42599 - protein, 50 aa, Artificial Sequence
  Quasi-synthetic sequence derived from human genome
PPRLLPRNTFSRKAFKLKKPSKYCSWKCAALSAIAAALLLAILLAYFIAM

SEQ ID NO: 42600 - protein, 50 aa, Artificial Sequence
  Quasi-synthetic sequence derived from human genome
RRRHMAAICIQARWKAYRESKRYQEQRKKIILLQSTCRGFRARQRFKALK

SEQ ID NO: 42601 - protein, 50 aa, Artificial Sequence
  Quasi-synthetic sequence derived from human genome
KMNILGLLIPFTIFMFCYIKILHQLKRCQNHNKTKAIRLVLIVVIASLLF

SEQ ID NO: 42602 - protein, 50 aa, Artificial Sequence
  Quasi-synthetic sequence derived from human genome
MLRTALRGAPRLLSRVQPRAPCLRRLWGRGARPEVAGRRRAWAWGWRRSS

SEQ ID NO: 42603 - protein, 50 aa, Artificial Sequence
  Quasi-synthetic sequence derived from human genome
LMILRLKSVRMLSGSKEKDRNLRRITRMVLVVVAVFIVCWTPIHIYVIIK

SEQ ID NO: 42604 - protein, 50 aa, Artificial Sequence
  Quasi-synthetic sequence derived from human genome
IVLMIISLAWLVFYYIQRFRYANARDRNQRRLGDAAKKAISKLQIRTIKK

SEQ ID NO: 42605 - protein, 50 aa, Artificial Sequence
  Quasi-synthetic sequence derived from human genome
KKKNTFIVLNKNRTIFRFNAASILCTLSPFNCIRRTTIKVLVHPFFQLFI

SEQ ID NO: 42606 - protein, 50 aa, Artificial Sequence
  Quasi-synthetic sequence derived from human genome
TCSQRRRRAMRAFRMLLYSKSTSLTFHWKLWGRHRGRRRGLAHPKNHLSP

SEQ ID NO: 42607 - protein, 50 aa, Artificial Sequence
  Quasi-synthetic sequence derived from human genome
VARKFASIARNQVRKKRQMAARERKVTRTIFAILLAFILTWTPYNVMVLV

SEQ ID NO: 42608 - protein, 50 aa, Artificial Sequence
  Quasi-synthetic sequence derived from human genome
LLGWSWLRRRRARGIPPGPTPWPLVGNFGHVLLPPFLRRRSWLSSRTRAA

SEQ ID NO: 42609 - protein, 50 aa, Artificial Sequence
  Quasi-synthetic sequence derived from human genome
RINIVKMAILPKVIYRFNAIPIKLPMTFFTELEKTTLKFIWNQKRARIAK

SEQ ID NO: 42610 - protein, 50 aa, Artificial Sequence
  Quasi-synthetic sequence derived from human genome
MRLLGAVQKGWIRCNTTIRKSGFGGITMLFTGYFVLCCSWSFRRLKKLCR

SEQ ID NO: 42611 - protein, 50 aa, Artificial Sequence
  Quasi-synthetic sequence derived from human genome
FLGFLLPLLIMSYCYFRIIQTLFSCKNHKKAKAIKLILLVVIVFFLFWTP

SEQ ID NO: 42612 - protein, 50 aa, Artificial Sequence
  Quasi-synthetic sequence derived from human genome
RLSQGWIRCNTTIRKSGFGGITMLFTGYFVLCCSWSFRRLKKLCRPLPWK

SEQ ID NO: 42613 - protein, 50 aa, Artificial Sequence
  Quasi-synthetic sequence derived from human genome
ERVDLFYLRGDRGQILVICLIAVMVVFIILVIGVCTCCHPLRKRRKRKKK

SEQ ID NO: 42614 - protein, 50 aa, Artificial Sequence
  Quasi-synthetic sequence derived from human genome
MMRFMLLFSRQGKLRLQKWYLATSDKERKKMVRELMQVVLARKPKMCSFL

SEQ ID NO: 42615 - protein, 50 aa, Artificial Sequence
  Quasi-synthetic sequence derived from human genome
RIKNTFNWTVPFLSWLAIVALCVFTAILYCIPLRYIVLVWGINKFTKKLR

SEQ ID NO: 42616 - protein, 50 aa, Artificial Sequence
  Quasi-synthetic sequence derived from human genome
LLYLLAVAVVIILFIILLGVIMAKRKRKHGSLWLPEGFTLRRDASNHKRR

SEQ ID NO: 42617 - protein, 50 aa, Artificial Sequence
  Quasi-synthetic sequence derived from human genome
WKKGLPWRAKMSRGNSKQRKLKINPKRYKGNFLQSCVQLRASRLRTPTWV

SEQ ID NO: 42618 - protein, 50 aa, Artificial Sequence
  Quasi-synthetic sequence derived from human genome
KKGVFNKSRCTICSKLAEVWIFIPKLLFRLTVIILTFKCYYVLFHLHNAR

SEQ ID NO: 42619 - protein, 50 aa, Artificial Sequence
  Quasi-synthetic sequence derived from human genome
GRRRRRPLQRGKPPYSYIALIAMALAHAPGRRLTLAAIYRFITERFAFYR

SEQ ID NO: 42620 - protein, 50 aa, Artificial Sequence
  Quasi-synthetic sequence derived from human genome
LARCPHCRKVSSIGRRYPRKRCICCFLLGLLLAVTATGLAFGTWKHARRY

SEQ ID NO: 42621 - protein, 50 aa, Artificial Sequence
  Quasi-synthetic sequence derived from human genome
FYLLWIDAKVAARMVWRLLHGQVLTRRERRRLLRTCVDFFRLVPFMVFLI

SEQ ID NO: 42622 - protein, 50 aa, Artificial Sequence
  Quasi-synthetic sequence derived from human genome
RAIRNFHTSPRFQAAPVPLLLMILKPVQKLFAIIVGRGIRKWWQALPPNK

SEQ ID NO: 42623 - protein, 50 aa, Artificial Sequence
  Quasi-synthetic sequence derived from human genome
VIQRCYRKYKQLTWIALKFALYKKMTQAAILIQSKFRSYYEQKRFQQSRR

SEQ ID NO: 42624 - protein, 50 aa, Artificial Sequence
  Quasi-synthetic sequence derived from human genome
RNHKTFMVLNRKRTIYRFSAKHALFIFGPFNSIRSLAIRVSVHSLFSMFI

SEQ ID NO: 42625 - protein, 50 aa, Artificial Sequence
  Quasi-synthetic sequence derived from human genome
LLIGTWALFFRKRRADMPRVFVFRALLLVLIFLFVVSYWLFYGVRILDSR

SEQ ID NO: 42626 - protein, 50 aa, Artificial Sequence
  Quasi-synthetic sequence derived from human genome
AVQIILRISFLILLGIGIYALWKRSIQSIQKTLLFVITLYKLYKKGSHIF

SEQ ID NO: 42627 - protein, 50 aa, Artificial Sequence
  Quasi-synthetic sequence derived from human genome
TEANPQYLGLARKKSGILLLTLVSFLIFILFIIVQLFIMKLRKAHVIWKK

SEQ ID NO: 42628 - protein, 50 aa, Artificial Sequence
  Quasi-synthetic sequence derived from human genome
VWPALWELYRELGLFQGPALGLRNHLGRKLRRRKKKKAKRTTNWKIITDR

SEQ ID NO: 42629 - protein, 50 aa, Artificial Sequence
  Quasi-synthetic sequence derived from human genome
DAKQKMRQAWKSWLIYVVVRRTKLQMQTTALEFRQRIILRVWWSTWRQRL

SEQ ID NO: 42630 - protein, 50 aa, Artificial Sequence
  Quasi-synthetic sequence derived from human genome
MMLCVTVNFFIFLKILKLLISKLKAHQMCFRDYKYRLAKSTLVLIPLLGV

SEQ ID NO: 42631 - protein, 50 aa, Artificial Sequence
  Quasi-synthetic sequence derived from human genome
NHRLKSYMKFLFVREPFERLVSAYRNKFTQKYNISFHKRYGTKIIKRQRK

SEQ ID NO: 42632 - protein, 50 aa, Artificial Sequence
  Quasi-synthetic sequence derived from human genome
FLRQKSAALIIQKYIRAREAGKHERIKYIEFKKSTVILQALVRGWLVRKR

SEQ ID NO: 42633 - protein, 50 aa, Artificial Sequence
  Quasi-synthetic sequence derived from human genome
KPRKASSSLAGAACAPLFALLSRGRRRRMHVLRRRWDLGSLCRALLTRGL

SEQ ID NO: 42634 - protein, 50 aa, Artificial Sequence
  Quasi-synthetic sequence derived from human genome
RICSSAPLLYFLFICPFVLLLLLLISLLCLYWKARKLSTLRSNTRKEKAL

SEQ ID NO: 42635 - protein, 50 aa, Artificial Sequence
  Quasi-synthetic sequence derived from human genome
LQTCLAVLGRALPTSRLDLACSLSWNVIRYSLQKLRLVRWLLKKVFQCRR

SEQ ID NO: 42636 - protein, 50 aa, Artificial Sequence
  Quasi-synthetic sequence derived from human genome
KYVKVFHKFLNANRHKTRHTGKKPFKCKKCGKSFCMLLHLSQHKRIHIRE

SEQ ID NO: 42637 - protein, 50 aa, Artificial Sequence
  Quasi-synthetic sequence derived from human genome
VYRYCCKLNKKLKSYSLSRKKIVHYTCFDQRKRANAAFLIGAYAVIYLKK

SEQ ID NO: 42638 - protein, 50 aa, Artificial Sequence
  Quasi-synthetic sequence derived from human genome
KRSWPFLRSFRVLRVFKLAKSWPTLNTLIKIIGNSVGALGSLTVVLVIVI

SEQ ID NO: 42639 - protein, 50 aa, Artificial Sequence
  Quasi-synthetic sequence derived from human genome
LRVLRALRILYVMRLARHSLGLQTLGLTVRRCTREFGLLLLFLAVAITLF

SEQ ID NO: 42640 - protein, 50 aa, Artificial Sequence
  Quasi-synthetic sequence derived from human genome
KYWIYVCAGMFIVVSFAGRLVVYKIVYMFLFLLCLTLFQVYYSLWRKLLK

SEQ ID NO: 42641 - protein, 50 aa, Artificial Sequence
  Quasi-synthetic sequence derived from human genome
RLSRASSRSVEFFLSRRRRARSSVCRRKVAQAREKRFTFVLAVVMGVFVL

SEQ ID NO: 42642 - protein, 50 aa, Artificial Sequence
  Quasi-synthetic sequence derived from human genome
FLKITSTRLLCSRLCQQLRSKRKFFGTVPISRLHRRVVITGIGLVTPLGV

SEQ ID NO: 42643 - protein, 50 aa, Artificial Sequence
  Quasi-synthetic sequence derived from human genome
WKWIVGPMFLYLCERLVRFWRSQQKVVITKVVTHPFKTIELQMKKKGFKM

SEQ ID NO: 42644 - protein, 50 aa, Artificial Sequence
  Quasi-synthetic sequence derived from human genome
RRLPARPGTAGTTSTRARRKPRSLALLRTLSVVLLAFVACWGPLFLLLLL

SEQ ID NO: 42645 - protein, 50 aa, Artificial Sequence
  Quasi-synthetic sequence derived from human genome
RLGFGGFLTRGFPKAAAPVRHSGDHGKRLFVIRPSRFYDRRFLKLLRFYI

SEQ ID NO: 42646 - protein, 50 aa, Artificial Sequence
  Quasi-synthetic sequence derived from human genome
YWLIIRLPILFAIGVNFLIFVRVICIVVSKLKANLMCKTDIKCRLAKSTL

SEQ ID NO: 42647 - protein, 50 aa, Artificial Sequence
  Quasi-synthetic sequence derived from human genome
FCCHQLLLILRGQTRHQVRKGVAVRARPWRKNLQEVFGKRWLLGLLVPMF

SEQ ID NO: 42648 - protein, 50 aa, Artificial Sequence
  Quasi-synthetic sequence derived from human genome
KSMGLKKKAFVWARNIGFKVNSKKMLGKYNTPVSYRMAKTLVFSKVKTSL

SEQ ID NO: 42649 - protein, 50 aa, Artificial Sequence
  Quasi-synthetic sequence derived from human genome
LIAVRLASLNQILDPWVYLLLRKILLRKFCQMRKRRLREQFWRPASSGSG

SEQ ID NO: 42650 - protein, 50 aa, Artificial Sequence
  Quasi-synthetic sequence derived from human genome
LKKEKQFKLQEQRRKSLRGRERVLSILRGVPHGKGRAIRLGVLKSPLKKL

SEQ ID NO: 42651 - protein, 50 aa, Artificial Sequence
  Quasi-synthetic sequence derived from human genome
LRLLRGLRRRNVQKKVALAKKLLAKLRFLAEEPQPPLPDVLVWMLSGQRR

SEQ ID NO: 42652 - protein, 50 aa, Artificial Sequence
  Quasi-synthetic sequence derived from human genome
ILASQKVKKIWQKQFRWPKNRLQILKFCKAREDLLKIQKERDFHRMHHKR

SEQ ID NO: 42653 - protein, 50 aa, Artificial Sequence
  Quasi-synthetic sequence derived from human genome
ARSLALALLCLVLSTCVGPYLFPYFIPLNGDRLLRNKKRKARGTMVRWLR

SEQ ID NO: 42654 - protein, 50 aa, Artificial Sequence
  Quasi-synthetic sequence derived from human genome
LCAISLCARVRKLRSAGRCGKFHQVRRVMTILFLTMVISYFGCMKAAPMK

SEQ ID NO: 42655 - protein, 50 aa, Artificial Sequence
  Quasi-synthetic sequence derived from human genome
RCWRFRGPKPVWGLPQLCRAGGLPRHPDAALFFPPLRRLILFKGARYYVL

SEQ ID NO: 42656 - protein, 50 aa, Artificial Sequence
  Quasi-synthetic sequence derived from human genome
MKPPISRAKMILITKAAIKAIKLYKHVVQIVEKFIKKCKPEYKVPGLYVI

SEQ ID NO: 42657 - protein, 50 aa, Artificial Sequence
  Quasi-synthetic sequence derived from human genome
LRCVRLLRIFKVTRHWASLSNLVASLLNSMKSIASLLLLLFLFIIIFSLL

SEQ ID NO: 42658 - protein, 50 aa, Artificial Sequence
  Quasi-synthetic sequence derived from human genome
ATVVAITVLISTATFWRNKKSNKVLPMRRVLRKRPSPAPRTIRIEWLKSK

SEQ ID NO: 42659 - protein, 50 aa, Artificial Sequence
  Quasi-synthetic sequence derived from human genome
LWLKNRTLDEHLTCLLLWVKQRKDLLHLCCKKLKILGMPFRNIRSILKMV

SEQ ID NO: 42660 - protein, 50 aa, Artificial Sequence
  Quasi-synthetic sequence derived from human genome
KLYVALWAAFLASCFFPYRLVGLAVGLYAGIKFFLIDFIFKRCPRLRAKY

SEQ ID NO: 42661 - protein, 50 aa, Artificial Sequence
  Quasi-synthetic sequence derived from human genome
RFLFNELRPAVCNDLSIMSKFKLLSSLPHWRRIAQKIIREPRKKRVPKKP

SEQ ID NO: 42662 - protein, 50 aa, Artificial Sequence
  Quasi-synthetic sequence derived from human genome
RFVKWPRYIRLQRQRAILYKRLKVPPAINQFTQALDRQTATQLLKLAHKY

SEQ ID NO: 42663 - protein, 50 aa, Artificial Sequence
  Quasi-synthetic sequence derived from human genome
VQVVSAQKKLPVRRPPLPGRRLPLPGRRPPQRPIGKAKPKKQSKKKVPFW

SEQ ID NO: 42664 - protein, 50 aa, Artificial Sequence
  Quasi-synthetic sequence derived from human genome
FILFCLRLMHIFTISKTLGPKIIIVKRMMKDVFFFLFLLAVWVVSFGVAK

SEQ ID NO: 42665 - protein, 50 aa, Artificial Sequence
  Quasi-synthetic sequence derived from human genome
RKRRRQLRASVFALALPLSLGPCWALWVAVPKASATIRGPQRRLLASLLQ

SEQ ID NO: 42666 - protein, 50 aa, Artificial Sequence
  Quasi-synthetic sequence derived from human genome
VARRCGRPRRRDPRRRRTPALPRPWPGRGGPGRSLLHRHLFIQQLLRTCW

SEQ ID NO: 42667 - protein, 50 aa, Artificial Sequence
  Quasi-synthetic sequence derived from human genome
KFKKLFRLNNFGLLNSNWGAVPFGKIVGKFPGQILRSSFGKQYMLRRPAL

SEQ ID NO: 42668 - protein, 50 aa, Artificial Sequence
  Quasi-synthetic sequence derived from human genome
LRTFRLMRVLKLVRFLPALQRQLVVLMKTMDNVATFCMLLMLFIFIFSIL

SEQ ID NO: 42669 - protein, 50 aa, Artificial Sequence
  Quasi-synthetic sequence derived from human genome
ITFFRLFRVMRLVKLLSRGEGIRTLLWTFIKSFQALPYVALLIVMLFFIY

SEQ ID NO: 42670 - protein, 50 aa, Artificial Sequence
  Quasi-synthetic sequence derived from human genome
FLRRPGAPASWIWWRMLRQVLRRGLQSFCHRLGLCVSRHPVFFLTVPAVL

SEQ ID NO: 42671 - protein, 50 aa, Artificial Sequence
  Quasi-synthetic sequence derived from human genome
KAKRKTNLTWSCRVNKTQHASTKLFLNLATLLPFCVCLMSFFLLILSLRR

SEQ ID NO: 42672 - protein, 50 aa, Artificial Sequence
  Quasi-synthetic sequence derived from human genome
VIKIQSSYRRWMIRKRMREMHRAATFIQSTFRMHRLHMRYQALKQASVVI

SEQ ID NO: 42673 - protein, 50 aa, Artificial Sequence
  Quasi-synthetic sequence derived from human genome
LAFLGKKFLREKNKMTKKQTRNRQNKFPPKPALRSSPVHRVQHFPLLWKV

SEQ ID NO: 42674 - protein, 50 aa, Artificial Sequence
  Quasi-synthetic sequence derived from human genome
LVLLLVALSALFLGRWLVVRLATKWCQRKLQAELKIGSFRFFWIQNVSLK

SEQ ID NO: 42675 - protein, 50 aa, Artificial Sequence
  Quasi-synthetic sequence derived from human genome
RTEIRMARMARKAGNFYVPAEPKLAFVIRIRGINGVSPKVRKVLQLLRLR

SEQ ID NO: 42676 - protein, 50 aa, Artificial Sequence
  Quasi-synthetic sequence derived from human genome
RRKVGDMWILFFLWLWTSFNTAFLALQSLRFGFGFRRGRSFLLRSWHHLM

SEQ ID NO: 42677 - protein, 50 aa, Artificial Sequence
  Quasi-synthetic sequence derived from human genome
RRLLKPAYGTSGGLPRAKRKSVRTIAVVLAVFALCFLPFHVTRTLYYSFR

SEQ ID NO: 42678 - protein, 50 aa, Artificial Sequence
  Quasi-synthetic sequence derived from human genome
MLYRFLARRTNSTFNQVVLKRLFMSRTNRPPLSLSRMIRKMKLPGRENKT

SEQ ID NO: 42679 - protein, 50 aa, Artificial Sequence
  Quasi-synthetic sequence derived from human genome
LFVKRLRRKTYLSNMAKTMRMVLKSKRRVSVLKSDLQAIINQGTLATSKK

SEQ ID NO: 42680 - protein, 50 aa, Artificial Sequence
  Quasi-synthetic sequence derived from human genome
YFRRKEKMFRFFIRRMVKAQSFYWVVLCVVALNTLCVAMVHYNQPRRLTT

SEQ ID NO: 42681 - protein, 50 aa, Artificial Sequence
  Quasi-synthetic sequence derived from human genome
KLKDKAGYMSGMLVPVGVGIAGALFILGALYSIKVMNRRRRNGFKRHKRK

SEQ ID NO: 42682 - protein, 50 aa, Artificial Sequence
  Quasi-synthetic sequence derived from human genome
MQSWRRRKSLWLALSASWLLLVLLGGFSLLRLALPPRPRPGASQGWPRWL

SEQ ID NO: 42683 - protein, 50 aa, Artificial Sequence
  Quasi-synthetic sequence derived from human genome
MTAFCLFTWDKWLKVYKSIYFLGHIFFLSLLFILPYIHKAMVPRKEKLKK

SEQ ID NO: 42684 - protein, 50 aa, Artificial Sequence
  Quasi-synthetic sequence derived from human genome
KQRRKESKRTNKWQKMLADWTKYRSTKKLSQRVYKVIPLAVRGRAWSLLL

SEQ ID NO: 42685 - protein, 50 aa, Artificial Sequence
  Quasi-synthetic sequence derived from human genome
VTILCLLAAGFVVYLKRKTLIRLLFTNKKTTIEKLRCVRPSRPPRGFQPC

SEQ ID NO: 42686 - protein, 50 aa, Artificial Sequence
  Quasi-synthetic sequence derived from human genome
MRRIRYEFKAKNIKKKKVSIMVSVDGVKVILKKKKKKKEWTWDESKMLVM

SEQ ID NO: 42687 - protein, 50 aa, Artificial Sequence
  Quasi-synthetic sequence derived from human genome
TSRAQVPPLSWIRQCYRTLDRRLRKNLRALVVVHATWYVKAFLALLRPFI

SEQ ID NO: 42688 - protein, 50 aa, Artificial Sequence
  Quasi-synthetic sequence derived from human genome
GVKILRFSSPIFYGNVDGFKKCIKSTVGFDAIRVYNKRLKALRKIQKLIK

SEQ ID NO: 42689 - protein, 50 aa, Artificial Sequence
  Quasi-synthetic sequence derived from human genome
IFVFFRKLTTIFPLNWKYRKALSLGCQRVTLHKNMFLTYILNSMIIIIHL

SEQ ID NO: 42690 - protein, 50 aa, Artificial Sequence
  Quasi-synthetic sequence derived from human genome
FILYTVRTKVFQSEASKVLMLLSSIGRRKSLPSVTRPRLRVKMYNFLRSL

SEQ ID NO: 42691 - protein, 50 aa, Artificial Sequence
  Quasi-synthetic sequence derived from human genome
RHQLKTKVVHLSKLPKDTALLLDPNIYRTMPQKRLKRTLIRKVFNLYLSK

SEQ ID NO: 42692 - protein, 50 aa, Artificial Sequence
  Quasi-synthetic sequence derived from human genome
PFLLLIPKFARWFSVPWKVIFVFALLAFLFFTSWYSSYGFTRRWNCILMR

SEQ ID NO: 42693 - protein, 50 aa, Artificial Sequence
  Quasi-synthetic sequence derived from human genome
RKRCIKKFSIQRFPKILVLHLKRFSESRIRTSKLTTFVNFPLRDLDLREF

SEQ ID NO: 42694 - protein, 50 aa, Artificial Sequence
  Quasi-synthetic sequence derived from human genome
RLTRKRLCSFLIALYCLFSLYAAYHVFFGRRRQAPAGSPRGLRKGAAPAR

SEQ ID NO: 42695 - protein, 50 aa, Artificial Sequence
  Quasi-synthetic sequence derived from human genome
TINKNARATLSSIRHMIRKNKYRPDLRMAAIRRASAILRSQKPVMVKRKR

SEQ ID NO: 42696 - protein, 50 aa, Artificial Sequence
  Quasi-synthetic sequence derived from human genome
WKKTFIQGGQVSLVRHKDVRRIRSLQRSVQVLRAIVVMYVICWLPYHARR

SEQ ID NO: 42697 - protein, 50 aa, Artificial Sequence
  Quasi-synthetic sequence derived from human genome
KRFGCLCGKRFAVKPKRDRHIMLTFSLRPFGCGICNKRFKLKHHLTEHMK

SEQ ID NO: 42698 - protein, 50 aa, Artificial Sequence
  Quasi-synthetic sequence derived from human genome
KTNRIARILAGSKKKICTRKPRFMSAWAQVIIASILISVQLTLVVTLIIM

SEQ ID NO: 42699 - protein, 50 aa, Artificial Sequence
  Quasi-synthetic sequence derived from human genome
IHKVVTGTMALIFSFLIVVLVLYVSWKCFPASLRQLRQCFVTQRRKQKQK

SEQ ID NO: 42700 - protein, 50 aa, Artificial Sequence
  Quasi-synthetic sequence derived from human genome
IRRRSKFANLGRIFKPWKWRKKKSEKFKHTSAALERKISMRQSREELIKR

SEQ ID NO: 42701 - protein, 50 aa, Artificial Sequence
  Quasi-synthetic sequence derived from human genome
RLFCVFYGLFGVPLCLTWISALGKFFGGRAKRLGQFLTKRGVSLRKAQIT

SEQ ID NO: 42702 - protein, 50 aa, Artificial Sequence
  Quasi-synthetic sequence derived from human genome
VKLKSKYLDMRRQIKMKNKHIFFTKESEKPFFKKSKILSKVEKFLTWVNK

SEQ ID NO: 42703 - protein, 50 aa, Artificial Sequence
  Quasi-synthetic sequence derived from human genome
RVTVFPSKTVAQYSGVPWWIILVAILAGILMLALLVFILWKCGFFKRNKK

SEQ ID NO: 42704 - protein, 50 aa, Artificial Sequence
  Quasi-synthetic sequence derived from human genome
KLKNAYVLYYLAIVGHSLSIFTLVISLGIFVFFRKLTTIFPLNWKYRKAL

SEQ ID NO: 42705 - protein, 50 aa, Artificial Sequence
  Quasi-synthetic sequence derived from human genome
MSSHKTFTIKRFLAKKQKQNRPIPQWIQMKPGSKIRYNSKRRHWRRTKLG

SEQ ID NO: 42706 - protein, 50 aa, Artificial Sequence
  Quasi-synthetic sequence derived from human genome
VISILIKQVLNWMLRKLSCRCCARCCPAPGAPLARRNAITPGSRLRRRLA

SEQ ID NO: 42707 - protein, 50 aa, Artificial Sequence
  Quasi-synthetic sequence derived from human genome
IRIRGINGVSPKVRKVLQLLRLRQIFNGTFVKLNKASINMLRIVEPYIAW

SEQ ID NO: 42708 - protein, 50 aa, Artificial Sequence
  Quasi-synthetic sequence derived from human genome
RPKRLLLVLVSAFFIFWSPFNVVLLVHLWRRVMLKEIYHPRMLLILQASF

SEQ ID NO: 42709 - protein, 50 aa, Artificial Sequence
  Quasi-synthetic sequence derived from human genome
IVGMFLAELIEKYFVSPTLFRVIRLARIGRILRLIKGAKGIRTLLFALMM

SEQ ID NO: 42710 - protein, 50 aa, Artificial Sequence
  Quasi-synthetic sequence derived from human genome
KHKLYQFLHLRKAAITIQSSYRRLMVKKKLQEMQRAAVLIQATFRMYRTY

SEQ ID NO: 42711 - protein, 50 aa, Artificial Sequence
  Quasi-synthetic sequence derived from human genome
VFLYTTFGQSAFSQLRLTPGLRKVLFATALGTVALALAAHQLKRRRRRKK

SEQ ID NO: 42712 - protein, 50 aa, Artificial Sequence
  Quasi-synthetic sequence derived from human genome
KLVSPKWKNFKGLKLQWRDKIRLNNAIWRAWYMQYLEKRKNPVCHFVTPL

SEQ ID NO: 42713 - protein, 50 aa, Artificial Sequence
  Quasi-synthetic sequence derived from human genome
LVWKNWLGVKRQPLWTLVLILWPVIIFIILAITRTKFPPTAKPTCYLAPR

SEQ ID NO: 42714 - protein, 50 aa, Artificial Sequence
  Quasi-synthetic sequence derived from human genome
LRFKRTHIKMKKQPKGYGLRCHRAIITICRLIGIKDMYAKVSGSINMLSL

SEQ ID NO: 42715 - protein, 50 aa, Artificial Sequence
  Quasi-synthetic sequence derived from human genome
LGFPKKVYKPIILQQKPRKASEKQSIWIRTKPSDIIRKYISKYSVFLRHR

SEQ ID NO: 42716 - protein, 50 aa, Artificial Sequence
  Quasi-synthetic sequence derived from human genome
KAARKRASPTGGIKKPHRYKPGTLALREIRKYQKSTQLLLRKLPFQRLVR

SEQ ID NO: 42717 - protein, 50 aa, Artificial Sequence
  Quasi-synthetic sequence derived from human genome
AKDREGTKINLAVANTGILVFQGFTKINAFNWAKVRKLSFKRKRFLIKLR

SEQ ID NO: 42718 - protein, 50 aa, Artificial Sequence
  Quasi-synthetic sequence derived from human genome
KTPSQKRYVAYFAQVKHLYNWNLPPRRILFIKHFIIYSIPRYVRDLKIQI

SEQ ID NO: 42719 - protein, 50 aa, Artificial Sequence
  Quasi-synthetic sequence derived from human genome
VKQGYVKIRSRKLGIFRRCWLVFKKASSKGPRRLEKFPDEKAAYFRNFHK

SEQ ID NO: 42720 - protein, 50 aa, Artificial Sequence
  Quasi-synthetic sequence derived from human genome
KCGGKCALVRHKFNRLPRVLILHLKRYSFNVALSLNNKIGQQVIIPRYLT

SEQ ID NO: 42721 - protein, 50 aa, Artificial Sequence
  Quasi-synthetic sequence derived from human genome
KPFFRLQKFLRRTQFLLFFLTAAYLMTGSLLLLQRVRVALPQGPRAPGPL

SEQ ID NO: 42722 - protein, 50 aa, Artificial Sequence
  Quasi-synthetic sequence derived from human genome
AYKEFDRKYKKNLKALYVVHPTSFIKVLWNILKPLISHKFGKKVIYFNYL

SEQ ID NO: 42723 - protein, 50 aa, Artificial Sequence
  Quasi-synthetic sequence derived from human genome
MIAHLGVFPSKAERKITSRPFTRFRTAVRVVIAILRLRFLVKKWQEVDRK

SEQ ID NO: 42724 - protein, 50 aa, Artificial Sequence
  Quasi-synthetic sequence derived from human genome
ILLRRKLTAPVAFSVIAMFNVMKFSIAILPFSIKAMAEANVSLRRMKKIL

SEQ ID NO: 42725 - protein, 50 aa, Artificial Sequence
  Quasi-synthetic sequence derived from human genome
ARLRGFLVRQKFAEHSHFLRTWLPAVIKIQAHWRGYRQRKIYLEWLQYFK

SEQ ID NO: 42726 - protein, 50 aa, Artificial Sequence
  Quasi-synthetic sequence derived from human genome
LQLLRRHTLRAAERNVRRKKVSFQLERIIKKQRLLEAQKRLEKLTTLCWL

SEQ ID NO: 42727 - protein, 50 aa, Artificial Sequence
  Quasi-synthetic sequence derived from human genome
VRRRRRRPGGRVPKDRPSLTVTPKRWKLRARPSLTVTPRRLGLRARPPQK

SEQ ID NO: 42728 - protein, 50 aa, Artificial Sequence
  Quasi-synthetic sequence derived from human genome
TWCFIRHGRTAYLQLYATLLLLLIVSVLACNFSVILNLIRMHRRSRRSRC

SEQ ID NO: 42729 - protein, 50 aa, Artificial Sequence
  Quasi-synthetic sequence derived from human genome
MSVVRSSVHARWIVGKVIGTKMQKTAKVRVTRLVLDPYLLKYFNKRKTYF

SEQ ID NO: 42730 - protein, 50 aa, Artificial Sequence
  Quasi-synthetic sequence derived from human genome
FRWMRLRIRRMADAWIQAIKSLAEKQNLEKRKRKKVLVHLGLLTKESGFK

SEQ ID NO: 42731 - protein, 50 aa, Artificial Sequence
  Quasi-synthetic sequence derived from human genome
RLKVAITMLTARGIIRFVIGFSLPMSIVAICYGLIAAKIHKKGMIKSSRP

SEQ ID NO: 42732 - protein, 50 aa, Artificial Sequence
  Quasi-synthetic sequence derived from human genome
KWLLLLGLVALSECIMYKVPLIRKKSLRRTLSERGLLKDFLKKHNLNPAR

SEQ ID NO: 42733 - protein, 50 aa, Artificial Sequence
  Quasi-synthetic sequence derived from human genome
IFLLTILAALALLVLILLCLLIYYCRRRCLKPRQQHRKLQLSGPSDGNKR

SEQ ID NO: 42734 - protein, 50 aa, Artificial Sequence
  Quasi-synthetic sequence derived from human genome
RLRNAKIYVERAVKQKKIFTIQGCYPVIRCLLRRRGWVEKKMVHRSGPTL

SEQ ID NO: 42735 - protein, 50 aa, Artificial Sequence
  Quasi-synthetic sequence derived from human genome
RARGYLARQRYQQMRRSLVKFRSLVHAYVSRRRYLKLRAEWRCQVEGALL

SEQ ID NO: 42736 - protein, 50 aa, Artificial Sequence
  Quasi-synthetic sequence derived from human genome
IVGMFLADIIEKYFVSPTLFRVIRLARIGRILRLIKGAKGIRTLLFALMM

SEQ ID NO: 42737 - protein, 50 aa, Artificial Sequence
  Quasi-synthetic sequence derived from human genome
AWKTHVWQDEKRRPKRREIPLKVLVKAVLFACMLMRKTMASRVRVTILFA

SEQ ID NO: 42738 - protein, 50 aa, Artificial Sequence
  Quasi-synthetic sequence derived from human genome
MRAKKKKKKKKKLKDVLNENLQRKREGLHSLAFKSYKPEIQNKLLIIKKK

SEQ ID NO: 42739 - protein, 50 aa, Artificial Sequence
  Quasi-synthetic sequence derived from human genome
QKLKLYFAQERNMNFTREQSRHPAWWFMSVKVKLKRKKRQKTPNRKLPRR

SEQ ID NO: 42740 - protein, 50 aa, Artificial Sequence
  Quasi-synthetic sequence derived from human genome
FRKKVPPIIGITTQFHAWWHILTGLGSYLHILFSLYTRTLYLRYRPKVKF

SEQ ID NO: 42741 - protein, 50 aa, Artificial Sequence
  Quasi-synthetic sequence derived from human genome
YKRYLWATVTIQRHWRAYLRRKQDQQRYEMLKSSTLIIQSMFRKWKQRKM

SEQ ID NO: 42742 - protein, 50 aa, Artificial Sequence
  Quasi-synthetic sequence derived from human genome
WWAYAIHGVLEVNVCPRLWMWSWKHIRKHRQKVKQYKELYKKKLTSKKPP

SEQ ID NO: 42743 - protein, 50 aa, Artificial Sequence
  Quasi-synthetic sequence derived from human genome
IIYCHKLTIILTKWRNTARHKSKKKEDELILKHELQLKKWKNRLILKRAA

SEQ ID NO: 42744 - protein, 50 aa, Artificial Sequence
  Quasi-synthetic sequence derived from human genome
RKVPGFVPASPWGLRLPQKFLFLLFLSGLVTLCFGALFLLPHSSRLKRLF

SEQ ID NO: 42745 - protein, 50 aa, Artificial Sequence
  Quasi-synthetic sequence derived from human genome
FGRSKIFIRNPRTLFKLEDLRKQRLEDLATLIQKIYRGWKCRTHFLLMKK

SEQ ID NO: 42746 - protein, 50 aa, Artificial Sequence
  Quasi-synthetic sequence derived from human genome
LLLQTKNSSKVLFRKSEKYMKLFLWLLVGVGLLGLGLRHKAYERKLGKVA

SEQ ID NO: 42747 - protein, 50 aa, Artificial Sequence
  Quasi-synthetic sequence derived from human genome
KHSLAFVVRIERIDGVSLLVQRTIARLRLKKIFSGVFVKVTPQNLKMLRI

SEQ ID NO: 42748 - protein, 50 aa, Artificial Sequence
  Quasi-synthetic sequence derived from human genome
RILNTNLRQIMVISVLAAAVSLLYFSVVIIRNKYGRLTRDKKFQRYLARV

SEQ ID NO: 42749 - protein, 50 aa, Artificial Sequence
  Quasi-synthetic sequence derived from human genome
GCPTNGPKIPSIATGMVGALLLLLVVALGIGLFMRRRHIVRKRTLRRLLQ

SEQ ID NO: 42750 - protein, 50 aa, Artificial Sequence
  Quasi-synthetic sequence derived from human genome
IPVAIFYTLVIPLLNPFIYSLRNKEVINIMKKIMKKRKFCHILKQMSSPL

SEQ ID NO: 42751 - protein, 50 aa, Artificial Sequence
  Quasi-synthetic sequence derived from human genome
RPEEQGPRMAFFSILTVRSALFALRYNILTLMRMLSLKSLKKQMKKVKKM

SEQ ID NO: 42752 - protein, 50 aa, Artificial Sequence
  Quasi-synthetic sequence derived from human genome
KKLLNGLCPKITYLFYKLFTLLSWMLSVVLLLFLNVKIALFLLLFLWLLG

SEQ ID NO: 42753 - protein, 50 aa, Artificial Sequence
  Quasi-synthetic sequence derived from human genome
LMAFLIMVVVYLRIYVYVKRKTNVLSPHTSGSISRRRTPMKLMKTVMTVL

SEQ ID NO: 42754 - protein, 50 aa, Artificial Sequence
  Quasi-synthetic sequence derived from human genome
LLLPKGVVLKLKPVATRFPRKAWRQKRSSVLKPLLIQPSPSLQPSFNPGK

SEQ ID NO: 42755 - protein, 50 aa, Artificial Sequence
  Quasi-synthetic sequence derived from human genome
KQFAMNQLKVARALTLLRFELLPDPTRIPIPMARLVLKSKNGIHLRLRRL

SEQ ID NO: 42756 - protein, 50 aa, Artificial Sequence
  Quasi-synthetic sequence derived from human genome
FYSSATGPKSVWYRIAFWLQWFNSFVNPLLYPLCHKRFQKAFLKIFCIKK

SEQ ID NO: 42757 - protein, 50 aa, Artificial Sequence
  Quasi-synthetic sequence derived from human genome
LLKIANFSNLIFLHLKRRVKSVVLVILLGPLLFLVCHLFVINMNQIIWTK

SEQ ID NO: 42758 - protein, 50 aa, Artificial Sequence
  Quasi-synthetic sequence derived from human genome
RSRTSILIICILITGLGIISVISHLTKRRRSQRNRRVGNTLKPFSRVLTP

SEQ ID NO: 42759 - protein, 50 aa, Artificial Sequence
  Quasi-synthetic sequence derived from human genome
KFQFGRTKIFFRAGQVAYLEKLRADKFRTATIMIQKTVRGWLQKVKYHRL

SEQ ID NO: 42760 - protein, 50 aa, Artificial Sequence
  Quasi-synthetic sequence derived from human genome
RPRLALLLLLLLLPLPSGAWYKHVASPRYHTVGRAAGLLMGLRRSPYLWR

SEQ ID NO: 42761 - protein, 50 aa, Artificial Sequence
  Quasi-synthetic sequence derived from human genome
FFIITAATVGYFIFYSARRLRNARAQSRKQRQLKADAKKAIGRLQLRTLK

SEQ ID NO: 42762 - protein, 50 aa, Artificial Sequence
  Quasi-synthetic sequence derived from human genome
AVRLASLNQILDPWVYLLLRKILLRKFCQMRKRRLREQLICSLQNSQIQR

SEQ ID NO: 42763 - protein, 50 aa, Artificial Sequence
  Quasi-synthetic sequence derived from human genome
LKQQRMYFVFAQMLSSVSTWLAIILLIFISLFPEILLIVLKNVRRRSARR

SEQ ID NO: 42764 - protein, 50 aa, Artificial Sequence
  Quasi-synthetic sequence derived from human genome
ALYRRLGKPLPPNVGFFHTAPPTGRRRKTSKSKLKAGKLLNPLVRQLKVV

SEQ ID NO: 42765 - protein, 50 aa, Artificial Sequence
  Quasi-synthetic sequence derived from human genome
RLILFLFCLMVLVESRKPKRKRWTGQVEMPKPSHLYKKNLDVTKIRKGKP

SEQ ID NO: 42766 - protein, 50 aa, Artificial Sequence
  Quasi-synthetic sequence derived from human genome
RLRRRGRSGLQPRVGKSTAILLGITTLFTLLWAPRVFVMLYHMYVAPVHR

SEQ ID NO: 42767 - protein, 50 aa, Artificial Sequence
  Quasi-synthetic sequence derived from human genome
SIILALVLLVVLLVVCGPLAYKKLVKKFRQKKQRQWIGPTGMNQNMSFHR

SEQ ID NO: 42768 - protein, 50 aa, Artificial Sequence
  Quasi-synthetic sequence derived from human genome
RKSRRGLLTIYMANLVLLFCITAAMYMFFFRCKDGLKGFTFSALRFIVGK

SEQ ID NO: 42769 - protein, 50 aa, Artificial Sequence
  Quasi-synthetic sequence derived from human genome
ITFFRLFRVMRLVKLLSRGEGIRTLLWTFIKSFQALPYVALLIAMLFFIY

SEQ ID NO: 42770 - protein, 50 aa, Artificial Sequence
  Quasi-synthetic sequence derived from human genome
KQKVARARIQHRPPRQPTEYFDMGIFLAFFVVVSLVCLILLVKIKLKQRR

SEQ ID NO: 42771 - protein, 50 aa, Artificial Sequence
  Quasi-synthetic sequence derived from human genome
LREYKVVGRCLPTPKCHTPPLYRMRIFAPNHVVAKSRFWYFVSQLKKMKK

SEQ ID NO: 42772 - protein, 50 aa, Artificial Sequence
  Quasi-synthetic sequence derived from human genome
VLFYGRKIMRKVSQSTSSLVDTSVSATSRPRMRKKLKMLNIAKKILRIQK

SEQ ID NO: 42773 - protein, 50 aa, Artificial Sequence
  Quasi-synthetic sequence derived from human genome
FIYLRHVPLRKVHLFTLIQLTCLVLLWVIKASPAAIVFPMMVLALVFVRK

SEQ ID NO: 42774 - protein, 50 aa, Artificial Sequence
  Quasi-synthetic sequence derived from human genome
LAKQRSVCTWGKNKPGIGAVILKRAKALAGQSVRICKGPRAVFSRILLLF

SEQ ID NO: 42775 - protein, 50 aa, Artificial Sequence
  Quasi-synthetic sequence derived from human genome
SLKLKLTASMAFSMLASLNLLRLSVFFVPIAVKGLTNSKSAVMRFKKFFL

SEQ ID NO: 42776 - protein, 50 aa, Artificial Sequence
  Quasi-synthetic sequence derived from human genome
RQRRILGQPLSIPTSQPKQKRTSMISFFSKVSWKLRFQKREPLKNVFFIL

SEQ ID NO: 42777 - protein, 50 aa, Artificial Sequence
  Quasi-synthetic sequence derived from human genome
LLVLLIVKMAGRCKSGFDPRHGSHNIKKKAWYLIAMLLKLAFCLALCAKL

SEQ ID NO: 42778 - protein, 50 aa, Artificial Sequence
  Quasi-synthetic sequence derived from human genome
SRQKWIVKPPASARGIGIQVIHKWSQLPKRRPLLVQRYLHKPYLISGSKF

SEQ ID NO: 42779 - protein, 50 aa, Artificial Sequence
  Quasi-synthetic sequence derived from human genome
PKLVKPKKKRRKKSVYTVGLRGLINLGNTCFMNCIVQALTHIPLLKDFFL

SEQ ID NO: 42780 - protein, 50 aa, Artificial Sequence
  Quasi-synthetic sequence derived from human genome
LLKSFLQERLGIHLIRRKIVKPKHHVLMSRKESWKVKSEIPKVPKQPLVL

SEQ ID NO: 42781 - protein, 50 aa, Artificial Sequence
  Quasi-synthetic sequence derived from human genome
HVSFHKIIAGSVALFLSVAMILLVIYVSWKRYPASMKQLQQHSLMKRRRK

SEQ ID NO: 42782 - protein, 50 aa, Artificial Sequence
  Quasi-synthetic sequence derived from human genome
RPYSIQCALFLLLLLLGTIATIVFFCCWHRKLQKGRHPMKSVFSGRSRSR

SEQ ID NO: 42783 - protein, 50 aa, Artificial Sequence
  Quasi-synthetic sequence derived from human genome
CACRGKDPTRRELSLGRKKAPHRLCGRFSRISMKLPRIPLRRQKLPKVVV

SEQ ID NO: 42784 - protein, 50 aa, Artificial Sequence
  Quasi-synthetic sequence derived from human genome
RKKSKGLATRLSRRRVSCRELGRPDCDGWLLLRKAPGGFMGPRWRRRWFV

SEQ ID NO: 42785 - protein, 50 aa, Artificial Sequence
  Quasi-synthetic sequence derived from human genome
HSHIPLRPKHWFQLCRPMNPRARKNCSQIALFQKRRFQFFCSMRCRAWVS

SEQ ID NO: 42786 - protein, 50 aa, Artificial Sequence
  Quasi-synthetic sequence derived from human genome
KIIRPLRNIFLKKPVFAKTVSIFIWFFLFFISLPNTILSNKEATPSSVKK

SEQ ID NO: 42787 - protein, 50 aa, Artificial Sequence
  Quasi-synthetic sequence derived from human genome
KRHRGKHKFKVKEMYLTKLLSTKVAIHSVLEKLFRSIWSLPNSRAPFAIK

SEQ ID NO: 42788 - protein, 50 aa, Artificial Sequence
  Quasi-synthetic sequence derived from human genome
MKVRKRIKDCNKAAVTIQSKYRAYKTKKKYATYRASAIIIQRWYRGIKIT

SEQ ID NO: 42789 - protein, 50 aa, Artificial Sequence
  Quasi-synthetic sequence derived from human genome
FKSMSGTIQLGRKLITKYNRRELTDKLLIFLALALFLATVLYIVKKRLFP

SEQ ID NO: 42790 - protein, 50 aa, Artificial Sequence
  Quasi-synthetic sequence derived from human genome
RPPLLLRPVKLLRRRFRLLLALAVVSVGLWTLYLELVASAQVGGNPLNRR

SEQ ID NO: 42791 - protein, 50 aa, Artificial Sequence
  Quasi-synthetic sequence derived from human genome
QRRRKTVRLLLANLVIFLLCFVPYNSTLAVYGLLRSKLVAASVPARDRVR

SEQ ID NO: 42792 - protein, 50 aa, Artificial Sequence
  Quasi-synthetic sequence derived from human genome
KYIHKRWALVWLACLLFAAALSLILLLKKDHAKGWLRLLKQDVRSGAAAR

SEQ ID NO: 42793 - protein, 50 aa, Artificial Sequence
  Quasi-synthetic sequence derived from human genome
RQVALAVSKFLLAFLVPLAIIASSHAAVSLRLQHRGRRRPGRFVRLVAAV

SEQ ID NO: 42794 - protein, 50 aa, Artificial Sequence
  Quasi-synthetic sequence derived from human genome
FSNSIFLYLKWRVKKVVLVLLLVTSVFLFLNIALINIHINASINGYRRNK

SEQ ID NO: 42795 - protein, 50 aa, Artificial Sequence
  Quasi-synthetic sequence derived from human genome
IVKRKREENLKMVWRINPAHRKLQARLDQMRKFRRQHEQLRAVIVRVLRP

SEQ ID NO: 42796 - protein, 50 aa, Artificial Sequence
  Quasi-synthetic sequence derived from human genome
RRRRRGAAMEGKPRAGVALAPGPSGRRPSARCARRRRPGLLLPGLWLLLL

SEQ ID NO: 42797 - protein, 50 aa, Artificial Sequence
  Quasi-synthetic sequence derived from human genome
RRRQEGLRSICMHTKKRVSSFRGNKIVLKDVITLRRHVETKVRAKIRKRK

SEQ ID NO: 42798 - protein, 50 aa, Artificial Sequence
  Quasi-synthetic sequence derived from human genome
LKELVRFQDRMYQKDPVKAKTKRRLVLGLREVLKHLKLKKLKCVIISPNC

SEQ ID NO: 42799 - protein, 50 aa, Artificial Sequence
  Quasi-synthetic sequence derived from human genome
FRKYKGRRLKEQQEVAAAVIQRCYRKYKQLTWIALKFALYKKMTQAAILI

SEQ ID NO: 42800 - protein, 50 aa, Artificial Sequence
  Quasi-synthetic sequence derived from human genome
FKRLILFRPFGPIMKVKNEKLNMANTLINVIVPLAKRVDKFRQFMQNFRP

SEQ ID NO: 42801 - protein, 50 aa, Artificial Sequence
  Quasi-synthetic sequence derived from human genome
HKWCIRHFYKPMLRRGSSKWMARTGVFLASAFFHEYLVSVPLRMFRLWAF

SEQ ID NO: 42802 - protein, 50 aa, Artificial Sequence
  Quasi-synthetic sequence derived from human genome
IFLTESNKSVLQFQNVRRVVQIFRIMRILRILKLARHSTGLQSLGFTLRR

SEQ ID NO: 42803 - protein, 50 aa, Artificial Sequence
  Quasi-synthetic sequence derived from human genome
VVIPLKVISRGRSAKAPGWLSYSLRFGGQKHVVHMRVKKLLVSRHLPVFT

SEQ ID NO: 42804 - protein, 50 aa, Artificial Sequence
  Quasi-synthetic sequence derived from human genome
GLRSICMHTKKRVSSFRGNKIGLKDVITLRRHVETKVRAKIRKRKVTTKI

SEQ ID NO: 42805 - protein, 50 aa, Artificial Sequence
  Quasi-synthetic sequence derived from human genome
ARMWRIRRRYCQVLNAVRIIQAYWRCRSCASRGFIKGQYRVTANQLHLQL

SEQ ID NO: 42806 - protein, 50 aa, Artificial Sequence
  Quasi-synthetic sequence derived from human genome
RRHFLQMKRAAVTIQACWRSYRVRRALERTQAAVYLQASWRGYWQRKLYR

SEQ ID NO: 42807 - protein, 50 aa, Artificial Sequence
  Quasi-synthetic sequence derived from human genome
KRRWCVLKDETFLWFRSKQEALKQGWLHKKGGGSSTLSRRNWKKRWFVLR

SEQ ID NO: 42808 - protein, 50 aa, Artificial Sequence
  Quasi-synthetic sequence derived from human genome
KSSKSDHISTRSIAIIVPLVLLVTLITTLVIGLVLCKRKRRTKTIRRQPI

SEQ ID NO: 42809 - protein, 50 aa, Artificial Sequence
  Quasi-synthetic sequence derived from human genome
KVSLFWGWARHRSLCFLVVACLKVKTCLVCRFRISLEKHQQFSFFYCYRI

SEQ ID NO: 42810 - protein, 50 aa, Artificial Sequence
  Quasi-synthetic sequence derived from human genome
RAFVCRFSSVIFYETMYVGIVLLGLIAFDRFLKIIRPLRNIFLKKPVFAK

SEQ ID NO: 42811 - protein, 50 aa, Artificial Sequence
  Quasi-synthetic sequence derived from human genome
LKTKAAVISLQSAYRGWKVRKQIRREHQAALKIQSAFRMAKAQKQFRLFK

SEQ ID NO: 42812 - protein, 50 aa, Artificial Sequence
  Quasi-synthetic sequence derived from human genome
YFAQVVFKAKVKRRPEMSRGLLAVRGAFVGASLLFLLVNVLCAVLSHRRR

SEQ ID NO: 42813 - protein, 50 aa, Artificial Sequence
  Quasi-synthetic sequence derived from human genome
FISYYLKSNWLGLRFLRALRLLELPQILQILRAIKTSNSVKFSKLLSIIL

SEQ ID NO: 42814 - protein, 50 aa, Artificial Sequence
  Quasi-synthetic sequence derived from human genome
WKFARSKLWLSYFDDGKTLPPPFSLVPSPKSFVYFIMRIVNFPKCRRRRL

SEQ ID NO: 42815 - protein, 50 aa, Artificial Sequence
  Quasi-synthetic sequence derived from human genome
FPVVEALCTLRGRRCHCLPFPKRGMQRWMLPLRRGARLLPLASSKNPRAR

SEQ ID NO: 42816 - protein, 50 aa, Artificial Sequence
  Quasi-synthetic sequence derived from human genome
SSHRFRRSRSPMHYMYRPRSRSPRICHRFISRYRSRSRSRSPYRIRNPFR

SEQ ID NO: 42817 - protein, 50 aa, Artificial Sequence
  Quasi-synthetic sequence derived from human genome
GKKRNSTLYITMLLIVPVIVAGAIIVLLLYLKRLKIIIFPPIPDPGKIFK

SEQ ID NO: 42818 - protein, 50 aa, Artificial Sequence
  Quasi-synthetic sequence derived from human genome
AFLAEVKQMRARRKTAKMLMVVLLVFALCYLPISVLNVLKRVFGMFRQAS

SEQ ID NO: 42819 - protein, 50 aa, Artificial Sequence
  Quasi-synthetic sequence derived from human genome
KQRRKESKRTNKWQKMLADWTKYRSTKKLSQRVCKVIPLAVRGRALSLLL

SEQ ID NO: 42820 - protein, 50 aa, Artificial Sequence
  Quasi-synthetic sequence derived from human genome
RLVRMKVFHLSLSQSVVLRHHWILPFVQALKARMTSFHRFFFTANQVKIY

SEQ ID NO: 42821 - protein, 50 aa, Artificial Sequence
  Quasi-synthetic sequence derived from human genome
VLKNRSLKLQKMKYRPPKTKFFFTVIPQPIFLSPGITLTLPIVFRPLEAK

SEQ ID NO: 42822 - protein, 50 aa, Artificial Sequence
  Quasi-synthetic sequence derived from human genome
LLALLANQCRFVTGLRVRRAQQIAQLYGRLYSESSRRVLLGRLWRRLHGR

SEQ ID NO: 42823 - protein, 50 aa, Artificial Sequence
  Quasi-synthetic sequence derived from human genome
CQVPGPLFKFFFWIGYCNSSLNPVIYTVFNQDFRRSFKHILFRRRRRGFR

SEQ ID NO: 42824 - protein, 50 aa, Artificial Sequence
  Quasi-synthetic sequence derived from human genome
PLRVLPSVFWSPPSRKKPVLSARNSRMFGHLSPVRIPHLRGKFNLRLPSL

SEQ ID NO: 42825 - protein, 50 aa, Artificial Sequence
  Quasi-synthetic sequence derived from human genome
KKLKKPAKPLLSKIKLRNHCKRLEQKNASRKLEMGNLVLKEPKVVLYKNL

SEQ ID NO: 42826 - protein, 50 aa, Artificial Sequence
  Quasi-synthetic sequence derived from human genome
RIIYNLFHKTVPEFKYRILQILRVQNQFLWEKYKRKKEYMNRKMFGRDRI

SEQ ID NO: 42827 - protein, 50 aa, Artificial Sequence
  Quasi-synthetic sequence derived from human genome
SYQFILNLFSFLLRIKTSLLHEEVSLVEKKLFEKKYSVKRKKSRSKKVRR

SEQ ID NO: 42828 - protein, 50 aa, Artificial Sequence
  Quasi-synthetic sequence derived from human genome
RVRLKPKARLTPKIQKLLNREARNYTLSFKEAKMVKKFKDSKSVLLITCK

SEQ ID NO: 42829 - protein, 50 aa, Artificial Sequence
  Quasi-synthetic sequence derived from human genome
RGWLERKRLQRVMTKALDHGPDMKAVINMYGRLIHRVRYRRGLWRTRQIL

SEQ ID NO: 42830 - protein, 50 aa, Artificial Sequence
  Quasi-synthetic sequence derived from human genome
WRLLHGQVLTRRERRRLLRTCVDFFRLVPFMVFLIVPFMEFLLPVFLKLF

SEQ ID NO: 42831 - protein, 50 aa, Artificial Sequence
  Quasi-synthetic sequence derived from human genome
RVFMPLQAQVKAKASKPLQMQIKAPPRLRRAARVLMPLQAQVRAPRLLQV

SEQ ID NO: 42832 - protein, 50 aa, Artificial Sequence
  Quasi-synthetic sequence derived from human genome
SSRWWTLSTTLWALSLLLGVARSLWMLLKLRQRLRSPTAPFTSPLPRGKR

SEQ ID NO: 42833 - protein, 50 aa, Artificial Sequence
  Quasi-synthetic sequence derived from human genome
KSISNQVWKFQRYQLIMTFHDRPVLPPPMIILSHIYIIIMRLSGRCRKKR

SEQ ID NO: 42834 - protein, 50 aa, Artificial Sequence
  Quasi-synthetic sequence derived from human genome
LVPPALRGLVRPHKKRKKLSSSCRKAKRAKSQNPLRSFKHKGKKFRPTAK

SEQ ID NO: 42835 - protein, 50 aa, Artificial Sequence
  Quasi-synthetic sequence derived from human genome
LMAHPFLLLILLCMSLLLFQVIRLYQRRRWMIRALHLFPAPPAHWFYGHK

SEQ ID NO: 42836 - protein, 50 aa, Artificial Sequence
  Quasi-synthetic sequence derived from human genome
IKAFPFYNTVCILRKLFSHNMTRLRKFMVYFGKNQSLQKIQKTPLFVAAI

SEQ ID NO: 42837 - protein, 50 aa, Artificial Sequence
  Quasi-synthetic sequence derived from human genome
VLPKPRMRGLLARRLRNHMAVAFVLSLGVAALYKFRVADQRKKAYADFYR

SEQ ID NO: 42838 - protein, 50 aa, Artificial Sequence
  Quasi-synthetic sequence derived from human genome
RRGHVRIVSFLLRRNANVNLKNQKERTCLHYAVKKKFTFIDYLLIILLMP

SEQ ID NO: 42839 - protein, 50 aa, Artificial Sequence
  Quasi-synthetic sequence derived from human genome
AALMAVALIVFVLGSGMYKKFKPQGNIMGKVAKCIGFAIKNRFRHRSKAF

SEQ ID NO: 42840 - protein, 50 aa, Artificial Sequence
  Quasi-synthetic sequence derived from human genome
AGVILLALGALLVLQLIRRRRREHGALWLPPGFTRRPRTQSAPHRRRPPL

SEQ ID NO: 42841 - protein, 50 aa, Artificial Sequence
  Quasi-synthetic sequence derived from human genome
ARKRRRRRRLMELAEPKINWQVLKDRKGRCGKGYAWISPCKMSLHFCLCW

SEQ ID NO: 42842 - protein, 50 aa, Artificial Sequence
  Quasi-synthetic sequence derived from human genome
LYKPILRQKKHFNSLHIPKALQKALPFKNKPKTQAKAGKVPKDRRRPAVI

SEQ ID NO: 42843 - protein, 50 aa, Artificial Sequence
  Quasi-synthetic sequence derived from human genome
KRVKNAAANVLRETWLIYKNTKLVKKIDHAKVRKHQRKFLQAIHQLRSVK

SEQ ID NO: 42844 - protein, 50 aa, Artificial Sequence
  Quasi-synthetic sequence derived from human genome
WLSERRHYYLLRQFKIFSDFRMNKAFVTWKLNVKRIKTEKSRSFLYHHLF

SEQ ID NO: 42845 - protein, 50 aa, Artificial Sequence
  Quasi-synthetic sequence derived from human genome
VCFNMGQIVLAKKMLRKALKLLNRIFPYNLISLFLHIHVEKNRHFHYVNR

SEQ ID NO: 42846 - protein, 50 aa, Artificial Sequence
  Quasi-synthetic sequence derived from human genome
AALLLLALCLLVRRTRRPGEPPLIKGWLPYLGVVLNLRKDPLRFMKTLQK

SEQ ID NO: 42847 - protein, 50 aa, Artificial Sequence
  Quasi-synthetic sequence derived from human genome
RSGKADITKLIRRRPFRQIQVLEPLNLLITISGHKNRLRVYHLTWLRNKI

SEQ ID NO: 42848 - protein, 50 aa, Artificial Sequence
  Quasi-synthetic sequence derived from human genome
LKAKRKVVKMMIIVVMTFAICWLPYHIYFILTAIYQQLNRWKYIQQVYLA

SEQ ID NO: 42849 - protein, 50 aa, Artificial Sequence
  Quasi-synthetic sequence derived from human genome
KILGMLRVLRLLRTLRPLRVISRAQGLKLVVETLMSSLKPIGNIVVICCA

SEQ ID NO: 42850 - protein, 50 aa, Artificial Sequence
  Quasi-synthetic sequence derived from human genome
VRLLKFSREKKAAKTLGIVVGCFVLCWLPFFLVMPIGTYILKYDVLFWRK

SEQ ID NO: 42851 - protein, 50 aa, Artificial Sequence
  Quasi-synthetic sequence derived from human genome
FVKVVKNKAYFKRYQVKFRRRREGKTDYYARKRLVIQDKNKYNTPKYRMI

SEQ ID NO: 42852 - protein, 50 aa, Artificial Sequence
  Quasi-synthetic sequence derived from human genome
LLLEGLARWKTHHLQCVRKRLLHRQSTQLLAQRLSRTCFRQWRQQLAARR

SEQ ID NO: 42853 - protein, 50 aa, Artificial Sequence
  Quasi-synthetic sequence derived from human genome
FYKEFLSKNFQKHMYYNRDWYKRNFAITFFMGKVALERIWNKLKQKQKKR

SEQ ID NO: 42854 - protein, 50 aa, Artificial Sequence
  Quasi-synthetic sequence derived from human genome
AGPVFWRRLLGLLPGRPGLAALLGRLSDRLGRNRDRQRRRSPWLLLAPLL

SEQ ID NO: 42855 - protein, 50 aa, Artificial Sequence
  Quasi-synthetic sequence derived from human genome
RGRILSGVVTKMKMQRTIVIRRDYLHYIRKYNRFEKRHKNMSVHLSPCFR

SEQ ID NO: 42856 - protein, 50 aa, Artificial Sequence
  Quasi-synthetic sequence derived from human genome
KTWRVHAIFKNVKMKKKIIKDQKLLVIVGGMLLIDLCILICWQAVDPLRR

SEQ ID NO: 42857 - protein, 50 aa, Artificial Sequence
  Quasi-synthetic sequence derived from human genome
IFPSRMAQTIMKARLKGAQTGRNLLKKKSDALTLRFRQILKKIIETKMLM

SEQ ID NO: 42858 - protein, 50 aa, Artificial Sequence
  Quasi-synthetic sequence derived from human genome
RIGRILRLIKGAKGIRTLLFALMMSLPALFNIGLLLFLVMFIFSIFGMSN

SEQ ID NO: 42859 - protein, 50 aa, Artificial Sequence
  Quasi-synthetic sequence derived from human genome
RIVRALFEIALRKRWPTMTYRLLNLSKVIDKRLWGWASPLRQFSILPPHI

SEQ ID NO: 42860 - protein, 50 aa, Artificial Sequence
  Quasi-synthetic sequence derived from human genome
RPSASRGHRKRSRRVLYPRVVRRQLPVEEPNPAKRLLFLLLTIVFCQILM

SEQ ID NO: 42861 - protein, 50 aa, Artificial Sequence
  Quasi-synthetic sequence derived from human genome
KILTRGERLDGFGLLLKKIMAILIKRFHHTRRNWKGLIAQVILPIVFVTT

SEQ ID NO: 42862 - protein, 50 aa, Artificial Sequence
  Quasi-synthetic sequence derived from human genome
VIKRVVLSGHPFKIFTKMAVVRYMFFNREDVLWFKPVELRTKWGRRGHIK

SEQ ID NO: 42863 - protein, 50 aa, Artificial Sequence
  Quasi-synthetic sequence derived from human genome
VLRLLALIFAIVTTWMFIRSYMSFSMKTIRLPRWLAASPTKEIQVKKYKC

SEQ ID NO: 42864 - protein, 50 aa, Artificial Sequence
  Quasi-synthetic sequence derived from human genome
FRGLFRRNARRRPSAASIFVAPKRPCPLPRAAAAPLGVLPAVGWGLAIRK

SEQ ID NO: 42865 - protein, 50 aa, Artificial Sequence
  Quasi-synthetic sequence derived from human genome
IVLLCVMNLIILVNLIHLFIFRKSNFIFDKLHKVGIKTRRQWRRSQFCDI

SEQ ID NO: 42866 - protein, 50 aa, Artificial Sequence
  Quasi-synthetic sequence derived from human genome
SMKQLFLKAQKIVHKLFSLSKRCHKQPLISLPRQRTSTYWLTRIQSFLYC

SEQ ID NO: 42867 - protein, 50 aa, Artificial Sequence
  Quasi-synthetic sequence derived from human genome
RQARALGLLSAVERGRALGGRAVRSRRAIAVLSRWPAFPAFRAFLTFLYR

SEQ ID NO: 42868 - protein, 50 aa, Artificial Sequence
  Quasi-synthetic sequence derived from human genome
PFKIAYRKVGQCRRFQQLKKKNGSFKRKGIERWHRAVSTNLLKQNVLVPK

SEQ ID NO: 42869 - protein, 50 aa, Artificial Sequence
  Quasi-synthetic sequence derived from human genome
LLGKKKKRLRVDKWWGNRKELATVRTICSHVQNMIKGVTLGFRYKMRSVY

SEQ ID NO: 42870 - protein, 50 aa, Artificial Sequence
  Quasi-synthetic sequence derived from human genome
AQLLMVLRCLRPLRIFKLVPQMRKVVRELFSGFKEIFLVSILLLTLMLVF

SEQ ID NO: 42871 - protein, 50 aa, Artificial Sequence
  Quasi-synthetic sequence derived from human genome
MKAKLAVLLVTLVAAAVSYLRMEQKLRRGVAPRQPRIPRPQHKVRGYRYL

SEQ ID NO: 42872 - protein, 50 aa, Artificial Sequence
  Quasi-synthetic sequence derived from human genome
FRIGYSLYTRTWLGYLFYRQQLRRARNRYPKGHSKTQPRLFNGVKVLPIP

SEQ ID NO: 42873 - protein, 50 aa, Artificial Sequence
  Quasi-synthetic sequence derived from human genome
TMMVIIIAIGAGIILGYSYKRSVASLLGPLRRRGGRYTKSNFVAFLPKRK

SEQ ID NO: 42874 - protein, 50 aa, Artificial Sequence
  Quasi-synthetic sequence derived from human genome
RLPIRMAKALGKRTAKYRWFAVLYLLVCFLLLPSLVFGISMAGWQVMVGV

SEQ ID NO: 42875 - protein, 50 aa, Artificial Sequence
  Quasi-synthetic sequence derived from human genome
RRVAVVRLPLAHGSLLMMNHPTNTHWYHSLPVRKKVLAPRVNLTFRKILL

SEQ ID NO: 42876 - protein, 50 aa, Artificial Sequence
  Quasi-synthetic sequence derived from human genome
KRCRPSVYSLSYIKRGKTRNYLYPIWSPYAYYLYCYKYRITLREKMLPRC

SEQ ID NO: 42877 - protein, 50 aa, Artificial Sequence
  Quasi-synthetic sequence derived from human genome
RKAVISLQSYFRMRKARQYYLKMYKAIIVIQNYYHAYKAQVNQRKNFLQV

SEQ ID NO: 42878 - protein, 50 aa, Artificial Sequence
  Quasi-synthetic sequence derived from human genome
LPRKKLKHIRQGTNKGLIKKKLKNMLAAVVTKKKTHKYNCKSSGWISKCP

SEQ ID NO: 42879 - protein, 50 aa, Artificial Sequence
  Quasi-synthetic sequence derived from human genome
LKTGSFLNRLGKLLLHLFMVLCLTLFLNNIIKKILNLKSDEHIFKFLKAK

SEQ ID NO: 42880 - protein, 50 aa, Artificial Sequence
  Quasi-synthetic sequence derived from human genome
YVQMRLKKHRWYKKILKSRDPIIFSVGWRRFQTIPLYYIEDHNGRQRLLK

SEQ ID NO: 42881 - protein, 50 aa, Artificial Sequence
  Quasi-synthetic sequence derived from human genome
LTFHLSTPRSHHLYHARLWLHVLPTLPGTLCLRIFRWGPRRRRQGSRTLL

SEQ ID NO: 42882 - protein, 50 aa, Artificial Sequence
  Quasi-synthetic sequence derived from human genome
RCLGVLRPLRSLRWGRARYARRVAGAVWVLVLACQAPVLYFVTTSARGGR

SEQ ID NO: 42883 - protein, 50 aa, Artificial Sequence
  Quasi-synthetic sequence derived from human genome
YRCLLCSREFGKALQLTRHQRFVHRLERRHKCSICGKMFKKKSHVRNHLR

SEQ ID NO: 42884 - protein, 50 aa, Artificial Sequence
  Quasi-synthetic sequence derived from human genome
LQRKPRPGRVIRDKLRIYAHCTNHHNHNYVRGSITLFIINLHRSRKKIKL

SEQ ID NO: 42885 - protein, 50 aa, Artificial Sequence
  Quasi-synthetic sequence derived from human genome
LLPFGALRPLSRVGWRPVSRVALYKSVPTRLLSRAWGRLNQVELPHWLRR

SEQ ID NO: 42886 - protein, 50 aa, Artificial Sequence
  Quasi-synthetic sequence derived from human genome
LTGYRTYRCAHPLATLFKILASFYISLVIFYGLICMYTLWWMLRRSLKKY

SEQ ID NO: 42887 - protein, 50 aa, Artificial Sequence
  Quasi-synthetic sequence derived from human genome
PRLRLGERGLMEPLLPPKRRLLPRVRLLPLLLALAVGSAFYTIWSGWHRR

SEQ ID NO: 42888 - protein, 50 aa, Artificial Sequence
  Quasi-synthetic sequence derived from human genome
RPFYLAFVFCLALGLLQAIKLYLRRQRLLRDLRPFPAPPTHWFLGHQKFI

SEQ ID NO: 42889 - protein, 50 aa, Artificial Sequence
  Quasi-synthetic sequence derived from human genome
QRVGQMPLKSSVGSRRGFFTKLPPAERRYFKRVVLAARTKRGHLVLKSFK

SEQ ID NO: 42890 - protein, 50 aa, Artificial Sequence
  Quasi-synthetic sequence derived from human genome
VKLKWFYYSTRYVYLLVRHMYRIYGLQLLMEDTWKRIRFPDILRVFWLTR

SEQ ID NO: 42891 - protein, 50 aa, Artificial Sequence
  Quasi-synthetic sequence derived from human genome
LVLIPKAKPLTLLWAYFCFLLAALGVTAGAHRLWSHRSYRAKLPLRIFLA

SEQ ID NO: 42892 - protein, 50 aa, Artificial Sequence
  Quasi-synthetic sequence derived from human genome
WYVLVKDQKKMIIWFPDMVKDVIGSYKKWCRSILRRTSLILARVFGLHLR

SEQ ID NO: 42893 - protein, 50 aa, Artificial Sequence
  Quasi-synthetic sequence derived from human genome
LCYVLIIAKMRMVALKAGWQQRKRSERKITLMVMMVVMVFVICWMPFYVV

SEQ ID NO: 42894 - protein, 50 aa, Artificial Sequence
  Quasi-synthetic sequence derived from human genome
LRKFYKGKKYKPLDLRPKKTRAMRRRLNKHEENLKTKKQQRKERLYPLRK

SEQ ID NO: 42895 - protein, 50 aa, Artificial Sequence
  Quasi-synthetic sequence derived from human genome
RRTYRQVLMEHKATTIQKHVRGWMARRHFQRLRDAAIVIQCAFRMLKARR

SEQ ID NO: 42896 - protein, 50 aa, Artificial Sequence
  Quasi-synthetic sequence derived from human genome
FLFAFVVPILIITVCYGLMLLRLRSVRLLSGSKEKDRSLRRITRMVLVVV

SEQ ID NO: 42897 - protein, 50 aa, Artificial Sequence
  Quasi-synthetic sequence derived from human genome
PLKGPWRPTPRPRVPVPWRTPRFACRWLGYLGLLLLDVIICLLVLVGLIR

SEQ ID NO: 42898 - protein, 50 aa, Artificial Sequence
  Quasi-synthetic sequence derived from human genome
RWLGLHTFIRHKRTMVKTSVLVVQFVEAIVVLVRQMSHVRVTRALRCIFL

SEQ ID NO: 42899 - protein, 50 aa, Artificial Sequence
  Quasi-synthetic sequence derived from human genome
KARYLKKKNMRTLWINRITAASQEHGLKYPALIGNLVKVWVSMWVPLKFW

SEQ ID NO: 42900 - protein, 50 aa, Artificial Sequence
  Quasi-synthetic sequence derived from human genome
LSVYGKLRKVAKMGPYSMFCKLLGMWRHICTPRQVADKVKRFFSKYSMNR

SEQ ID NO: 42901 - protein, 50 aa, Artificial Sequence
  Quasi-synthetic sequence derived from human genome
GKRPKKGLATAKQRLGRILKIHRNGKLLLRQVIVQAECRQAIHEPKLKRR

SEQ ID NO: 42902 - protein, 50 aa, Artificial Sequence
  Quasi-synthetic sequence derived from human genome
IFGKSIARVEKVFRKKQVSQTKIRVISTILFILAGCIVFVTIPAVIFKYI

SEQ ID NO: 42903 - protein, 50 aa, Artificial Sequence
  Quasi-synthetic sequence derived from human genome
RIGRILRLIRGAKGIRTLLFALMMSLPALFNIGLLLFLVMFIYSIFGMAN

SEQ ID NO: 42904 - protein, 50 aa, Artificial Sequence
  Quasi-synthetic sequence derived from human genome
RIGRILRLIRAAKGIRTLLFALMMSLPALFNIGLLLFLVMFIYSIFGMSS

SEQ ID NO: 42905 - protein, 50 aa, Artificial Sequence
  Quasi-synthetic sequence derived from human genome
VVRQLRLRRRDSAAKEPPAPRRPASLAQRARRFLARLTARSARRRALKAR

SEQ ID NO: 42906 - protein, 50 aa, Artificial Sequence
  Quasi-synthetic sequence derived from human genome
LPLEYYLIPFLIIVGICLILIVIFMITKFVQDRHRARRNRLRKDQLKKLP

SEQ ID NO: 42907 - protein, 50 aa, Artificial Sequence
  Quasi-synthetic sequence derived from human genome
YKLWVPQPPPRTIKRTRRRLSRNRDPGRLILSTIRLRPRQVLCEKCKSTL

SEQ ID NO: 42908 - protein, 50 aa, Artificial Sequence
  Quasi-synthetic sequence derived from human genome
FRNLRLPKRLRVVYFLARTRLAQRLIMAGTVVWIGILVYTDPAGLRNYLA

SEQ ID NO: 42909 - protein, 50 aa, Artificial Sequence
  Quasi-synthetic sequence derived from human genome
WKIMKKAALLIQKYYRAYSIGREQNHLYLKTKAAVVTLQSAYRGMKVRKR

SEQ ID NO: 42910 - protein, 50 aa, Artificial Sequence
  Quasi-synthetic sequence derived from human genome
VILMLARRKERLPLYLRLLQRMEHSKKYPGFLLNNFHNLLRFWQQHYLHK

SEQ ID NO: 42911 - protein, 50 aa, Artificial Sequence
  Quasi-synthetic sequence derived from human genome
FHFNRYLTRRRRIEIAHTLCLSERQVKIWFQNRRMKWKKDHKLPNTKMRS

SEQ ID NO: 42912 - protein, 50 aa, Artificial Sequence
  Quasi-synthetic sequence derived from human genome
MKKLTTLSRRVVKVLFGDKMFHPHTLFDQFIATKVCNRKLFRRICSNFLF

SEQ ID NO: 42913 - protein, 50 aa, Artificial Sequence
  Quasi-synthetic sequence derived from human genome
KKGSLSVLRSFRLLRVFKLAKSWPTLNTLIKIIGNSVGALGNLTIILAII

SEQ ID NO: 42914 - protein, 50 aa, Artificial Sequence
  Quasi-synthetic sequence derived from human genome
IRKLIKDGLIIRKPVTVHSRARCRKNTLARRKGRHMGIGKRKGTANARMP

SEQ ID NO: 42915 - protein, 50 aa, Artificial Sequence
  Quasi-synthetic sequence derived from human genome
RVLRLLRTLRPLRVISRAPGLKLVVETLISSLKPIGNIVLICCAFFIIFG

SEQ ID NO: 42916 - protein, 50 aa, Artificial Sequence
  Quasi-synthetic sequence derived from human genome
LHLLIISCRKLFYFKIWAFLDVSFVERILKSQKERQCALRVFKARIYTNR

SEQ ID NO: 42917 - protein, 50 aa, Artificial Sequence
  Quasi-synthetic sequence derived from human genome
LRALLLWGRRLRPLLRAPALAAVPGGKPILCPRRTTAQLGPRRNPAWSLQ

SEQ ID NO: 42918 - protein, 50 aa, Artificial Sequence
  Quasi-synthetic sequence derived from human genome
LRHLKMHKLFLCLQCGKTFTQKKNLNRHIRGHMGIRPFQCTVCLKTFTAK

SEQ ID NO: 42919 - protein, 50 aa, Artificial Sequence
  Quasi-synthetic sequence derived from human genome
HKKKVNKGSTAARTFYLIKDIRFLLHEPIVNKFREYKVFVRKLRKAYGKS

SEQ ID NO: 42920 - protein, 50 aa, Artificial Sequence
  Quasi-synthetic sequence derived from human genome
LKKIFLAAKKKKASVHLPRIGHATKGFNWYGTERLIRKHLAARGIPTYIY

SEQ ID NO: 42921 - protein, 50 aa, Artificial Sequence
  Quasi-synthetic sequence derived from human genome
KKKFYVFGVAMTMMIRVSVYPFTLIRTRLQVQKGKSLYHGTFDAFIKILR

SEQ ID NO: 42922 - protein, 50 aa, Artificial Sequence
  Quasi-synthetic sequence derived from human genome
QADAKLLFTPQHKMLRLRLPNLKMVRLRVSFSAVVFKAVSDICKILNIRR

SEQ ID NO: 42923 - protein, 50 aa, Artificial Sequence
  Quasi-synthetic sequence derived from human genome
KLYKRRKESILTIQKYYKAYLKGKIERTNYLQKRAAAIQLQAAFRRLKAH

SEQ ID NO: 42924 - protein, 50 aa, Artificial Sequence
  Quasi-synthetic sequence derived from human genome
EKALEQIDENLIYWPRFIRHKCKQRFTKITQYLIRIRKLTLKRQRKLVPL

SEQ ID NO: 42925 - protein, 50 aa, Artificial Sequence
  Quasi-synthetic sequence derived from human genome
QLINWFICSLCVPRVRKLWSSRRPRTRRNLLLGTACAIYLGFLVSQVGRA

SEQ ID NO: 42926 - protein, 50 aa, Artificial Sequence
  Quasi-synthetic sequence derived from human genome
CLCRKRGRGACIKCERLRPRIRRRGLGPPAAAPARRRIPRTPALCTPLAL

SEQ ID NO: 42927 - protein, 50 aa, Artificial Sequence
  Quasi-synthetic sequence derived from human genome
SFVGGFVVMRFSLAVLYQACCVALLLWLALLLSIQRRLPRERKIKYSKLL

SEQ ID NO: 42928 - protein, 50 aa, Artificial Sequence
  Quasi-synthetic sequence derived from human genome
KFKVIALTVLASVRIYYQYRRVKPVTREIVIRDPYALRPLRRLIDAYAFR

SEQ ID NO: 42929 - protein, 50 aa, Artificial Sequence
  Quasi-synthetic sequence derived from human genome
FHYNRYLTRRRRVEIAHALCLSERQIKIWFQNRRMKWKKDHKLPNTKIRS

SEQ ID NO: 42930 - protein, 50 aa, Artificial Sequence
  Quasi-synthetic sequence derived from human genome
IRIMRVLRIARVLKLLKMAVGMRALLDTVMQALPQVGNLGLLFMLLFFIF

SEQ ID NO: 42931 - protein, 50 aa, Artificial Sequence
  Quasi-synthetic sequence derived from human genome
KYMKIFHKFSNLNGHKVRHTRKKPFKYKEFGKSFCIFSNLTQHKIICTRV

SEQ ID NO: 42932 - protein, 50 aa, Artificial Sequence
  Quasi-synthetic sequence derived from human genome
VKALRAFRVLRPLRLVSGVPSLQVVLNSIFKAMLPLFHIALLVLFMVIIY

SEQ ID NO: 42933 - protein, 50 aa, Artificial Sequence
  Quasi-synthetic sequence derived from human genome
YFRPLSMYSVMKGRVATVMYTVVTPMLNPFIYSLRNKDMKRGLKKLRHRI

SEQ ID NO: 42934 - protein, 50 aa, Artificial Sequence
  Quasi-synthetic sequence derived from human genome
VVAVFCILWNWNKRKKRQVPYLRVTVMPLLTLPQTRQRAKNIYDILPWRQ

SEQ ID NO: 42935 - protein, 50 aa, Artificial Sequence
  Quasi-synthetic sequence derived from human genome
KKPWSRKKKILWQLGTLVGAPVGIALIAGIAIPAMIIGIPVYVGRKIHNR

SEQ ID NO: 42936 - protein, 50 aa, Artificial Sequence
  Quasi-synthetic sequence derived from human genome
ILMRNLMNVRNVKRLLGKVHILLNIKEFILVRNHMSVSNVGRLSLVFLIL

SEQ ID NO: 42937 - protein, 50 aa, Artificial Sequence
  Quasi-synthetic sequence derived from human genome
WRRLRLQQLRRLRGLLRVLRGRPGAGSRRRGRMALCGQAAGAASLPSELI

SEQ ID NO: 42938 - protein, 50 aa, Artificial Sequence
  Quasi-synthetic sequence derived from human genome
RIGRILRLIKGAKGIRTLLFALMMSLPALFNIGLLLFLVMFIYAIFGMSN

SEQ ID NO: 42939 - protein, 50 aa, Artificial Sequence
  Quasi-synthetic sequence derived from human genome
RWFRRRRNQDRPSLLKKFREASWRFTFYLIAFIAGMAVIVDKPWFYDMKK

SEQ ID NO: 42940 - protein, 50 aa, Artificial Sequence
  Quasi-synthetic sequence derived from human genome
RYSGVVYPLKSLGRLKKKNAICISVLVWLIVVVAISPILFYSGTGVRKNK

SEQ ID NO: 42941 - protein, 50 aa, Artificial Sequence
  Quasi-synthetic sequence derived from human genome
KIRQALVAIFTHLRKIRNTKYPIQRALRLVEAISRDLSSQLLKVLGTRKL

SEQ ID NO: 42942 - protein, 50 aa, Artificial Sequence
  Quasi-synthetic sequence derived from human genome
VRRKMFIKHYREWAGALVKDGKRLYEAEKSKRESFGKLFRKSFLRNRLFR

SEQ ID NO: 42943 - protein, 50 aa, Artificial Sequence
  Quasi-synthetic sequence derived from human genome
ALKKLNKNKKLVKKLAKKYDAFLASESLIKQIPRILGPGLNKAGKFPSLL

SEQ ID NO: 42944 - protein, 50 aa, Artificial Sequence
  Quasi-synthetic sequence derived from human genome
TGVKKLPGVMLFKKKKTRKLKIALALSDLVIYTKAEKFKSFQHSRLYQQF

SEQ ID NO: 42945 - protein, 50 aa, Artificial Sequence
  Quasi-synthetic sequence derived from human genome
MKARRNKKQIPSFRKLIKTSKVKLENKLKNKQFKQQSTLKKYRKEQRKLR

SEQ ID NO: 42946 - protein, 50 aa, Artificial Sequence
  Quasi-synthetic sequence derived from human genome
LRWFQHRRNRRRRKPQRNLLRNFLVQAFGGCFGRSESPQPKASRSLKVKK

SEQ ID NO: 42947 - protein, 50 aa, Artificial Sequence
  Quasi-synthetic sequence derived from human genome
KTMVMDMFYAYVEMKRKKRVHFHGFMLDVHKRIHRLKQSLPKRKPGFMAK

SEQ ID NO: 42948 - protein, 50 aa, Artificial Sequence
  Quasi-synthetic sequence derived from human genome
KKIFVFLEHQTKVLKKRHTKEKVLRRAKRRWAPIPCSMLENSLGPFPLFL

SEQ ID NO: 42949 - protein, 50 aa, Artificial Sequence
  Quasi-synthetic sequence derived from human genome
WTHLLRLLRLIILLRIFHLFHQKRQLEKLIRRRVSENKRRYTRDGFDLDL

SEQ ID NO: 42950 - protein, 50 aa, Artificial Sequence
  Quasi-synthetic sequence derived from human genome
RLLPAQIEKWKLKQKKKLERKKLIKDMKAKIRVDTIAKRRAELILERDKK

SEQ ID NO: 42951 - protein, 50 aa, Artificial Sequence
  Quasi-synthetic sequence derived from human genome
KIRRKNCPACRLRKCCQAGMVLGGRKFKKFNKVRVVRALDAVALPQPVGV

SEQ ID NO: 42952 - protein, 50 aa, Artificial Sequence
  Quasi-synthetic sequence derived from human genome
MRKRKISVCQQTWALLCKNFLKKWRMKRESLMEWLNSLLLLLCLYIYPHS

SEQ ID NO: 42953 - protein, 50 aa, Artificial Sequence
  Quasi-synthetic sequence derived from human genome
LLWLCYLKSALNPLIYYWRIKKFHDACLDMMPKSFKFLPQLPGHTKRRIR

SEQ ID NO: 42954 - protein, 50 aa, Artificial Sequence
  Quasi-synthetic sequence derived from human genome
YWYSLYTRTWLGYLFYRQQLRRARNRYPKGHSKTQPRLFNGVKVLPIPVL

SEQ ID NO: 42955 - protein, 50 aa, Artificial Sequence
  Quasi-synthetic sequence derived from human genome
VFIIILVLCLRLLQSRCPRVLPKKLQNWNFLPLWMRSLKPWDAVVSKFTG

SEQ ID NO: 42956 - protein, 50 aa, Artificial Sequence
  Quasi-synthetic sequence derived from human genome
RGPHLLNALNSYKSRFLCGKEIKKKKCIFRLRIRVPPNPPGKLLPDKGLL

SEQ ID NO: 42957 - protein, 50 aa, Artificial Sequence
  Quasi-synthetic sequence derived from human genome
LKCKLGMKSILPIFRCLNSLERNIEKCRIFTRSDKCKVVIQFFYRHGIKR

SEQ ID NO: 42958 - protein, 50 aa, Artificial Sequence
  Quasi-synthetic sequence derived from human genome
IWLRGWKGNELQRCIRKRKMVGSRMFADDLHNLNKRIRYLYKHFNRHGKF

SEQ ID NO: 42959 - protein, 50 aa, Artificial Sequence
  Quasi-synthetic sequence derived from human genome
SIIVYKLRRKSNFRLRGYSTGKTTAILFTITSIFATLWAPRIIMILYHLY

SEQ ID NO: 42960 - protein, 50 aa, Artificial Sequence
  Quasi-synthetic sequence derived from human genome
KTLKIIGGKFGTSVLSYFNFLRWLLKFNIFSFILNFSFIIIPQFTVAKKN

SEQ ID NO: 42961 - protein, 50 aa, Artificial Sequence
  Quasi-synthetic sequence derived from human genome
KFITGKHGGRRPQRAEPQRICRALWLTPWPSLILKLLSWIILSNLFLHLR

SEQ ID NO: 42962 - protein, 50 aa, Artificial Sequence
  Quasi-synthetic sequence derived from human genome
LLKAVHIVQFIFILKLGTAFFMVLFQKPFSSGKTITKHQIIGSLKIPGRK

SEQ ID NO: 42963 - protein, 50 aa, Artificial Sequence
  Quasi-synthetic sequence derived from human genome
TIHLFRKPQRSFFGKLLREFRLVAADRRSWKILLFGVINLICTGFLLMWC

SEQ ID NO: 42964 - protein, 50 aa, Artificial Sequence
  Quasi-synthetic sequence derived from human genome
LYIELLPVPGAKKSAKLYIPYIILTIIILTIVGFIWLLKVNGCRKYKLNK

SEQ ID NO: 42965 - protein, 50 aa, Artificial Sequence
  Quasi-synthetic sequence derived from human genome
KVILAIRRAKNLRRLLYVSCNPRAAMGNFVDLCRAPSNRVKGIPFRPVKA

SEQ ID NO: 42966 - protein, 50 aa, Artificial Sequence
  Quasi-synthetic sequence derived from human genome
LAVPQIPSYRLNKICSGLSFQRKNQFMQRLHNYWLLKRQARNGVPLIRRL

SEQ ID NO: 42967 - protein, 50 aa, Artificial Sequence
  Quasi-synthetic sequence derived from human genome
LIQANWRGYWLRQKLISQMMAAKAIQEAWRRFNKRHILHSSKSLVKKTRA

SEQ ID NO: 42968 - protein, 50 aa, Artificial Sequence
  Quasi-synthetic sequence derived from human genome
RKKLQLSLADFRRLCILKGIYPHEPKHKKKVNKGSTAARTFYLIKDIRFL

SEQ ID NO: 42969 - protein, 50 aa, Artificial Sequence
  Quasi-synthetic sequence derived from human genome
HWVLGKTKVFLKYYHVEQLNLLLREVIGRVVVLQAYTKGWLGARRYKRVR

SEQ ID NO: 42970 - protein, 50 aa, Artificial Sequence
  Quasi-synthetic sequence derived from human genome
VRICLGAVILIILAGFLAEDWHSRRKRLRHRGRAVQRPLPPLPPLPLTRK

SEQ ID NO: 42971 - protein, 50 aa, Artificial Sequence
  Quasi-synthetic sequence derived from human genome
KTVRLLRLLRLLQKLERYSQCSAVVLTLLMSVFALLAHWMACIWYVIGRR

SEQ ID NO: 42972 - protein, 50 aa, Artificial Sequence
  Quasi-synthetic sequence derived from human genome
AYFPQILRFLRPWYFSRSHLNYHQKAPARWEWLYSIYRKGTKAQRRNVLR

SEQ ID NO: 42973 - protein, 50 aa, Artificial Sequence
  Quasi-synthetic sequence derived from human genome
LWLLGYRMRRNAVSIYILNLAAADFLFLSFQIIRLPLRLINISHLIRKIL

SEQ ID NO: 42974 - protein, 50 aa, Artificial Sequence
  Quasi-synthetic sequence derived from human genome
SMFRKPYVRRRPSKRRGARAFRCIKPAPVIHPASVIFTVPATTVKIVSLG

SEQ ID NO: 42975 - protein, 50 aa, Artificial Sequence
  Quasi-synthetic sequence derived from human genome
MFRKPYVRRRPSKRRGARAFRCIKPAPVIHPASVIFTVPATTVKIVSLGG

SEQ ID NO: 42976 - protein, 50 aa, Artificial Sequence
  Quasi-synthetic sequence derived from human genome
RKRYRRKLKKYGKNVGKVIIKGCRYVVIGLQGFAAAYSAPFAVATSVVSF

SEQ ID NO: 42977 - protein, 50 aa, Artificial Sequence
  Quasi-synthetic sequence derived from human genome
VIPSKKRVEKKERARLKTVKFHARTGMIESNRSIKTKRKKSFRLSRKFPF

SEQ ID NO: 42978 - protein, 50 aa, Artificial Sequence
  Quasi-synthetic sequence derived from human genome
KALPKKGVLGKSPLSALARKKARLSLVIRSPSLLQSGAKKKAQTLRFTIS

SEQ ID NO: 42979 - protein, 50 aa, Artificial Sequence
  Quasi-synthetic sequence derived from human genome
RIKARKRKQLHFFDSRLKDLKLGTNIKDLCAALWILMKNPVLICLALSKA

SEQ ID NO: 42980 - protein, 50 aa, Artificial Sequence
  Quasi-synthetic sequence derived from human genome
PKWFVKAGGVAMYAVSWCFMFSIWRFAWRKSIKKYHAWRSRRSEERQLKH

SEQ ID NO: 42981 - protein, 50 aa, Artificial Sequence
  Quasi-synthetic sequence derived from human genome
ARRWRKLYRANGHLFQAKRFNRRAYCGQCSERIWGLARQGYRCINCKLLV

SEQ ID NO: 42982 - protein, 50 aa, Artificial Sequence
  Quasi-synthetic sequence derived from human genome
RYRFRKRDKVLFYGRKIMRKVSQSTSSLVDTSVSATSRPRMRKKLKMLNI

SEQ ID NO: 42983 - protein, 50 aa, Artificial Sequence
  Quasi-synthetic sequence derived from human genome
RGLRQHPRAQLLYALLAALCFAVSRSLLLTCLVPAALLGLRYYYSRKVIR

SEQ ID NO: 42984 - protein, 50 aa, Artificial Sequence
  Quasi-synthetic sequence derived from human genome
IYTALKKGKLCFCCRTRRFSFFTWSYTCQFCKRPVCSQCCKKMRLPSKPY

SEQ ID NO: 42985 - protein, 50 aa, Artificial Sequence
  Quasi-synthetic sequence derived from human genome
APSRLSLKLLRAFMWSLVFSVALVAAAVYGCIALTHVLCRPRRGCCGRRR

SEQ ID NO: 42986 - protein, 50 aa, Artificial Sequence
  Quasi-synthetic sequence derived from human genome
GFFKRSICNKRVYRCSRDKNCVMSRKQRNRCQYCRLLKCLQMGMNRKAIR

SEQ ID NO: 42987 - protein, 50 aa, Artificial Sequence
  Quasi-synthetic sequence derived from human genome
LLMKRPCLHGSSLRRLPCRKRFVKNNSSQRTQKQKERILMQRKKREVLAR

SEQ ID NO: 42988 - protein, 50 aa, Artificial Sequence
  Quasi-synthetic sequence derived from human genome
RLRAIYTIMRWFRRHKVRAHLAELQRRFQAARQPPLYGRDLVWPLPPAVL

SEQ ID NO: 42989 - protein, 50 aa, Artificial Sequence
  Quasi-synthetic sequence derived from human genome
FVYKLFSLQDLLLLVRCSVQRIETRPRSKKRKKIRRQFPVYVLPKVEYQA

SEQ ID NO: 42990 - protein, 50 aa, Artificial Sequence
  Quasi-synthetic sequence derived from human genome
RIFKHFTRKRQRAMRRRVHQINGHKFMATYLRQPTYCSHCREFIWGVFGK

SEQ ID NO: 42991 - protein, 50 aa, Artificial Sequence
  Quasi-synthetic sequence derived from human genome
FGHLGKVVQVFRLMRIFRVLKLARHSTGLRSLGATLKHSYREVGILLLYL

SEQ ID NO: 42992 - protein, 50 aa, Artificial Sequence
  Quasi-synthetic sequence derived from human genome
VKALRAFRVLRPLRLVSGVPSLQVVLNSIIKAMVPLLHIALLVLFVIIIY

SEQ ID NO: 42993 - protein, 50 aa, Artificial Sequence
  Quasi-synthetic sequence derived from human genome
KVSILLDFTRGSRGRKNSRTMLLPLLRRFPEQVRVSLFHTPHLRGLLRLL

SEQ ID NO: 42994 - protein, 50 aa, Artificial Sequence
  Quasi-synthetic sequence derived from human genome
FRSSLSVRLLKFSREKKAAKTLAIVVGVFVLCWFPFFFVLPLGSLFPQLK

SEQ ID NO: 42995 - protein, 50 aa, Artificial Sequence
  Quasi-synthetic sequence derived from human genome
LKNLVRTFRLTNRNIIHKPAEWTLIAMVLLSFLLNVKTRIKTFMMIYFHL

SEQ ID NO: 42996 - protein, 50 aa, Artificial Sequence
  Quasi-synthetic sequence derived from human genome
FRKERIEGLRKRRRLLSIIVVLVVTFALCWMPYHLVKTLYMLGSLLHWPC

SEQ ID NO: 42997 - protein, 50 aa, Artificial Sequence
  Quasi-synthetic sequence derived from human genome
RLFRVMRLVKLLSRGEGIRTLLWTFIKSFQALPYVALLIVMLFFIYAVIG

SEQ ID NO: 42998 - protein, 50 aa, Artificial Sequence
  Quasi-synthetic sequence derived from human genome
RWYRGIKITNHQHKEYLNLKKTAIKIQSVYRGIRVRRHIQHMHRAATFIK

SEQ ID NO: 42999 - protein, 50 aa, Artificial Sequence
  Quasi-synthetic sequence derived from human genome
RRQGVVRLRLRDLQEAFQRKGSVPLGLATVLQDLLRKRLRRCIVCIRTRP

SEQ ID NO: 43000 - protein, 50 aa, Artificial Sequence
  Quasi-synthetic sequence derived from human genome
LSFAGTTALLLQGLFIVLILVGYISVKVMLKSIKTRLGRRVPAAPPALRR

SEQ ID NO: 43001 - protein, 17 aa, Artificial Sequence
  Synthetic: Nociceptin
FGGFTGARKSARKLANQ

SEQ ID NO: 43002 - protein, 22 aa, Artificial Sequence
  Synthetic: Natriuretic Peptide CNP-22
GLSKGCFGLKLDRIGSMSGLGC

SEQ ID NO: 43003 - protein, 20 aa, Artificial Sequence
  Synthetic: Neuropeptide-S
SFRNGVGTGNKKTSFQRAKS

SEQ ID NO: 43004 - protein, 41 aa, Artificial Sequence
  Synthetic: Urocortin 2
IVLSLDVPIGLLQILLEQARARAAREQATTNARILARVGHC

SEQ ID NO: 43005 - protein, 37 aa, Artificial Sequence
  Synthetic: Oxyntomodulin
HSQGTFTSDYSKYLDSRRAQDFVQWLMNTKRNRNNIA

SEQ ID NO: 43006 - protein, 21 aa, Artificial Sequence
  Synthetic: Catestatin
SSNKLSFRARAYGFRGPGPQL

SEQ ID NO: 43007 - protein, 29 aa, Artificial Sequence
  Synthetic: Neuropeptide-B
WYKPAAGHSSYSVGRAAGLLSGLRRSPYA

SEQ ID NO: 43008 - protein, 28 aa, Artificial Sequence
  Synthetic: Somatostatin
SANSNPAMAPRERKAGCKNFFWKTFTFC

SEQ ID NO: 43009 - protein, 28 aa, Artificial Sequence
  Synthetic: Natriuretic Peptide a, ANP
SLRRSSCFGGRMDRIGAQSGLGCNSFRY

SEQ ID NO: 43010 - protein, 27 aa, Artificial Sequence
  Synthetic: Secretin
HSDGTFTSELSRLREGARLQRLLQGLV

SEQ ID NO: 43011 - protein, 25 aa, Artificial Sequence
  Synthetic: Alarin
APAHRSSTFPKWVTKTERGRQPLRS

SEQ ID NO: 43012 - protein, 28 aa, Artificial Sequence
  Synthetic: Ghrelin-28
GSSFLSPEHQRVQQRKESKKPPAKLQPR

SEQ ID NO: 43013 - protein, 14 aa, Artificial Sequence
  Synthetic: T-Kinin
ISLMKRPPGFSPFR

SEQ ID NO: 43014 - protein, 32 aa, Artificial Sequence
  Synthetic: Big Dynorphin
YGGFLRRIRPKLKWDNQKRYGGFLRRQFKVVT

SEQ ID NO: 43015 - protein, 32 aa, Artificial Sequence
  Synthetic: Apelin Receptor Early Endogenous 1
  misc_feature (1)..(1): Xaa is pyroglutamate
XRPVNLTMRRKLRKHNCLQRRCMPLHSRVPFP

SEQ ID NO: 43016 - protein, 36 aa, Artificial Sequence
  Synthetic: Apelin -36
LVQPRGSRNGPGPWQGGRRKFRRQRPRLSHKGPNPF

SEQ ID NO: 43017 - protein, 30 aa, Artificial Sequence
  Synthetic: Neuropeptide-W
WYKHVASPRYHTVGRAAGLLMGLRRSPYLW

SEQ ID NO: 43018 - protein, 35 aa, Artificial Sequence
  Synthetic: Nei MHC Fusion
EIGDEENSAKFPIGRRDFDMLRCMLGRVYRPCWQV

SEQ ID NO: 43019 - protein, 39 aa, Artificial Sequence
  Synthetic: Corticotropin
SYSMEHFRWGKPVGKKRRPVKVYPNGAEDESAEAFPLEF

SEQ ID NO: 43020 - protein, 32 aa, Artificial Sequence
  Synthetic: Brain Natriuretic Peptide-32, BNP-32
SPKMVQGSGCFGRKMDRISSSSGRGCKVLRRH

SEQ ID NO: 43021 - protein, 29 aa, Artificial Sequence
  Synthetic: Natriuretic Peptide, CNP-29
YKGANKKGLSKGCFGLKLDRIGSMSGLGC

SEQ ID NO: 43022 - protein, 31 aa, Artificial Sequence
  Synthetic: Beta-Endorphin
YGGFMTSEKSQTPLVTLFKNAIIKNAYKKGE

SEQ ID NO: 43023 - protein, 29 aa, Artificial Sequence
  Synthetic: Cortistatin-29
  misc_feature (1)..(1): Xaa is pyroglutamate
XEGAPPQQSARRDRMPCRNFFWKTFSSCK

SEQ ID NO: 43024 - protein, 27 aa, Artificial Sequence
  Synthetic: FIBa-GVV27
GVVWVSFRGADYSLRAVRMKIRPLVTQ

SEQ ID NO: 43025 - protein, 22 aa, Artificial Sequence
  Synthetic: FIBa-SFR22
SFRGADYSLRAVRMKIRPLVTQ

SEQ ID NO: 43026 - protein, 28 aa, Artificial Sequence
  Synthetic: FIBb-GVV28
GVVWMNWKGSWYSMRKMSMKIRPFFPQQ

SEQ ID NO: 43027 - protein, 23 aa, Artificial Sequence
  Synthetic: FIBb-NWK23
NWKGSWYSMRKMSMKIRPFFPQQ

SEQ ID NO: 43028 - protein, 30 aa, Artificial Sequence
  Synthetic: FIBg-GII30
GIIWATWKTRWYSMKKTTMKIIPFNRLTIG

SEQ ID NO: 43029 - protein, 25 aa, Artificial Sequence
  Synthetic: FIBg-TWK25
TWKTRWYSMKKTTMKIIPFNRLTIG

SEQ ID NO: 43030 - protein, 44 aa, Artificial Sequence
  Synthetic: vWF-PQR44
PQRMSRNFVRYVQGLKKKKVIVIPVGIGPHANLKQIRLIEKQAP

SEQ ID NO: 43031 - protein, 29 aa, Artificial Sequence
  Synthetic: vWF-PQR29
PQRMSRNFVRYVQGLKKKKVIVIPVGIGP

SEQ ID NO: 43032 - protein, 19 aa, Artificial Sequence
  Synthetic: vWF-PQR19
PQRMSRNFVRYVQGLKKKK

SEQ ID NO: 43033 - protein, 25 aa, Artificial Sequence
  Synthetic: SCUB1-SKE25
SKEMFPRSFIKLLRSKVSRFLRPYK

SEQ ID NO: 43034 - protein, 26 aa, Artificial Sequence
  Synthetic: SCUB3-KHK26
KHKEMLPKSFIKLLRSKVSSFLRPYK

SEQ ID NO: 43035 - protein, 22 aa, Artificial Sequence
  Synthetic: SCUB3-MLP22
MLPKSFIKLLRSKVSSFLRPYK

SEQ ID NO: 43036 - protein, 25 aa, Artificial Sequence
  Synthetic: CPX1-HVR25
HVRIRVIKKKKVIMKKRKKLTLTRP

SEQ ID NO: 43037 - protein, 33 aa, Artificial Sequence
  Synthetic: FGF5-KKK33
KKKPPSPIKPKIPLSAPRKNTNSVKYRLKFRFG

SEQ ID NO: 43038 - protein, 19 aa, Artificial Sequence
  Synthetic: FGF5-KKK19
KKKPPSPIKPKIPLSAPRK

SEQ ID NO: 43039 - protein, 48 aa, Artificial Sequence
  Synthetic: SFRP1-FAL48
FALRMKIKEVKKENGDKKIVPKKKKPLKLGPIKKKDLKKLVLYLKNGA

SEQ ID NO: 43040 - protein, 32 aa, Artificial Sequence; identical to SEQ ID NO: 24342
  Synthetic: SFRP1-KKI32

SEQ ID NO: 43041 - protein, 26 aa, Artificial Sequence
  Synthetic: INTb-FTR26
FTRGKLMSSLHLKRYYGRILHYLKAK

SEQ ID NO: 43042 - protein, 25 aa, Artificial Sequence
  Synthetic: INTb-AWT25
AWTIVRVEILRNFYFINRLTGYLRN

SEQ ID NO: 43043 - protein, 34 aa, Artificial Sequence
  Synthetic: HSA-TFL34
TFLKKYLYEIARRHPYFYAPELLFFAKRYKAAFT

SEQ ID NO: 43044 - protein, 38 aa, Artificial Sequence
  Synthetic: HSA-GKA38
GKASSAKQRLKCASLQKFGERAFKAWAVARLSQRFPKA

SEQ ID NO: 43045 - protein, 36 aa, Artificial Sequence
  Synthetic: HSA-YKF36
YKFQNALLVRYTKKVPQVSTPTLVEVSRNLGKVGSK

SEQ ID NO: 43046 - protein, 30 aa, Artificial Sequence
  Synthetic: HSA-KER30
KERQIKKQTALVELVKHKPKATKEQLKAVM

SEQ ID NO: 43047 - protein, 41 aa, Artificial Sequence
  Synthetic: FDCSP-PYP41
PYPYPFRPLPPIPFPRFPWFRRNFPIPIPESAPTTPLPSEK

SEQ ID NO: 43048 - protein, 29 aa, Artificial Sequence
  Synthetic: FDCSP-PYP29
PYPYPFRPLPPIPFPRFPWFRRNFPIPIP

SEQ ID NO: 43049 - protein, 24 aa, Artificial Sequence
  Synthetic: PSPI-KTL24
KTLRKWLKMFKKRQLELYLPKFSI

SEQ ID NO: 43050 - protein, 34 aa, Artificial Sequence
  Synthetic: IL26-ALY34
ALYIKAAWLKATIPEDRIKNIRLLKKKTKKQFMK

SEQ ID NO: 43051 - protein, 37 aa, Artificial Sequence
  Synthetic: IL26-ALY35
MKSITRMKRIFYRIGNKGIYKAISELDILLSWIKKLL

SEQ ID NO: 43052 - protein, 44 aa, Artificial Sequence
  Synthetic: CXC19-VKE44
VKELIKKWEKQVSQKKKQKNGKKHQKKKVLKVRKSQRSRQKKTT

SEQ ID NO: 43053 - protein, 26 aa, Artificial Sequence
  Synthetic: INFk-AWE26
AWEIVRVEIRRCLYYFYKFTALFRRK

SEQ ID NO: 43054 - protein, 38 aa, Artificial Sequence
  Synthetic: NAPP-LIR38
LIRIPLHRVQPGRRILNLLRGWREPAELPKLGAPSPGD

SEQ ID NO: 43055 - protein, 23 aa, Artificial Sequence
  Synthetic: NAPP-LIR23
LIRIPLHRVQPGRRILNLLRGWR
